United States Patent Application Publication US 2012/0017292 A1 - sequence listing, part 18

SEQ ID NO: 86484 - protein, 278 aa, Zea mays
  Coding DNA Sequence Number=SeqID_43109
MDQEQNVTGPQGADTIRRSPRVQNKRKQLDKNELKERRKRLRLKVPLSPIQDAESDDEQDPDFAPAGDGSGDDNVGIVGGDENKGITKTRAIRCSPGKFIKLVNALSDELKSEVVAKGYQTLAEIRPPCLMQMLVPCGTSWESKFVATLIDAYLCLLFSNTDTCIRIDDVKYTQDIQNMANKNWCKAVVDRLSIAARLYRKDFAEKGINAPISGCGIFVARLYPLPTSHVTRLPRDRDFPYTYTEEARQGNTTRLLQSSTSFRKPATVYRKLQCRVLA

SEQ ID NO: 86485 - protein, 132 aa, Zea mays
  Coding DNA Sequence Number=SeqID_43110
MDSRYGTRRGDIGEPDDGFLTARGGGNEDGHGMSNSTAGGLHDVRWLMGERGALALYPEAEESGVRRGTIDAQPELNPKISGGGMQQHELASVLVEDDPDHEAHLAVPESEREMCLWAISKCFGDLVSNTSA

SEQ ID NO: 86486 - protein, 56 aa, Zea mays
  Coding DNA Sequence Number=SeqID_43111
MQMLYVDNLQHGFDTSPFSIPRCAFLDSKTIDAIANKDLRGDVPPGTTEFGHLRII

SEQ ID NO: 86487 - protein, 89 aa, Zea mays
  Coding DNA Sequence Number=SeqID_43112
  Homolog annotation: Hit_ID=A2Y8F3; Match level="QueryCoverage=86%, HitCoverage=9%, E-value=1e-17, Identity=61%"; Hit description =Putative uncharacterized protein
MLRSRYASQTSKQNPGTNQQLEIEMTAEKSRRLITSDCGGGGADAKPEAPVSEGVVNGDKWPRFADLGGMEQLLKDMQFLYLNLCPWRF

SEQ ID NO: 86488 - protein, 209 aa, Zea mays
  Coding DNA Sequence Number=SeqID_43113
  Subcellular localization annotation: CTP_CleavageSite=79; ConfidenceScore=5.27e-01
MGRITRGPLSWTRLHGGMTTSEAFASRRIRRRTAPASLHPPACGAPAVICPPACRNPRRERRNPHPLRNPPARRCPRPPCSKGPNADLSRTLTNCTRRGDAAAAMAAHSDTVATLVADVDATDTDGDVSEPGLNGPAHPPLLSLWFLKLNEGCLSTCGRASFSSASSAFGRVGGFELEDERPAATRVRAEKPARGKSSLSLSWNLHRKP

SEQ ID NO: 86489 - protein, 130 aa, Zea mays
  Coding DNA Sequence Number=SeqID_43114
MGEIRRLSASSLEERNSVGVGTFQPSFGFKDFHQLARLYTPRRQSPETATTSPWVGRSKPSYDLGPTLSFKDVHHPRWGGGQAEPELYLPRGFVGHPLPRCSRVRALAGPAGGPDFDNAGVGDSFSSAMN

SEQ ID NO: 86490 - protein, 382 aa, Zea mays
  Coding DNA Sequence Number=SeqID_43115
  Subcellular localization annotation: CTP_CleavageSite=60; ConfidenceScore=5.64e-01
MVAFQGGHPPFKGGSPYSRPHPSQTESSPTHSKVLPYGAGAGSHTSCKPTQGRRSQTAARGAYNRPAVTSDPPLLPRPAGERVGGHAGSMQPRQVGALLRLPTRPAWRPRPTRHATGAPTASCMQLHRHLRHHRASSTAEPIPRLEATQRTTQQRQPGAAVSTAKNGPAVMTVAGGQEQQSRHQSSLRPIRGQREHPLPRREDNTPVFRSSSDSRTRNDRPVNHSPRRINSAAGQAAPLAPSLPTDQRFEGWPPEGFNSRLRSRGPYTHYWGSKAGPRRVHSRLRRRARDDHGYVRYITKARAALPRGSEAALANPAPAEPLTASTYQPENLGPDRTPGLRQSGPAGGTIGNSASPDPGLGLGLSPGRRRTPLRPTQGSDSG

SEQ ID NO: 86491 - protein, 178 aa, Zea mays
  Coding DNA Sequence Number=SeqID_43116
MALPPLLLAERRRRGVCKKAESVPDRPLALSRGSGAALANPALAEPLIASTYQPENLGPDRGNPHQHEAAKARWARLSQGSVHSSDSINASPEPSLGQGQPTPEDFRLARGPPPTANGSDSGSAPEDGELRSARPRARTRAKSQKTVNSAPPDPGLGLGLSPGRRRTPLRPTQGSDSG

SEQ ID NO: 86492 - protein, 86 aa, Zea mays
  Coding DNA Sequence Number=SeqID_43117
MRIRCQWSRRMVSSSLLSFLVWVNLCRLWAGILISRQKTMSKPSQQTTFKVIGTNGLLMIHLYSSLIWTCHLTSNRYSFCSDGARD

SEQ ID NO: 86493 - protein, 26 aa, Zea mays
  Coding DNA Sequence Number=SeqID_43118
MPKPIKTHMGTNGHLDLDTGGDLLLI

SEQ ID NO: 86494 - protein, 159 aa, Zea mays
  Coding DNA Sequence Number=SeqID_43119
MLSLDSAKLNYPATIKKKQREYMKWFCIGNHNSRLHEFLGQCPVHRLDWMSGPYPNIPKPLLQTCRQRDLRYEGSAPERLSYFPKNKIRRSARTSTNLVDDLVGPPLPQNCPPVSALVTEPSTSMTDSLAEDSENRAIQSSYFLGELLQAPRSQFYRVT

SEQ ID NO: 86495 - protein, 129 aa, Zea mays
  Coding DNA Sequence Number=SeqID_43120
MGEERIRNSTAEDRHGRNGGDEYTCEDDDAMGEESNLDDACRMWRRSCGGAVKTLANSMVTDLIQTTQAAEDDEWNRNGMEDRNLVPAKTTRKAADEAEGLRTRPASRCGGGDGGSCEGRELRRRAVEP

SEQ ID NO: 86496 - protein, 61 aa, Zea mays
  Coding DNA Sequence Number=SeqID_43121
MDHESTPHRGRGFCASTAESRIVAVWAELSVSARFTIAGHCVAGSGVGWGRQRSGLRSVDG

SEQ ID NO: 86497 - protein, 244 aa, Zea mays
  Coding DNA Sequence Number=SeqID_43122
  Gene Ontology: Mol. function=calcium-dependent phospholipid binding; Cellular component=cytoplasm; Biological process=signal transduction
  Homolog annotation: Hit_ID=A3BYJ5; Match level="QueryCoverage=98%, HitCoverage=85%, E-value=1e-108, Identity=82%"; Hit description =Putative uncharacterized protein
  Pfam annotation: Domain name=Annexin; Domain location=11-68; Score =39.7; E_value=1e-08; Accession=PF00191.11; Description=Annexin
  Pfam annotation: Domain name=Annexin; Domain location=174-239; Score =121.6; E_value=2.4e-33; Accession=PF00191.11; Description=Annexin
  Pfam annotation: Domain name=Annexin; Domain location=98-164; Score =92.9; E_value=1e-24; Accession=PF00191.11; Description=Annexin
  Pfam module annotation: Pfam domain module=Annexin::Annexin::Annexin; Domain location=11-68::174-239::98-164
MSLWILDPAGRDATVLREALNGDTMDLRAATEIICSRTPSQLQIMKQTYYARFGTYLEHDIAHHTSVLHCPALGSFYLHIMGIPRYEVPRLILQLVTHDAKDLYKAGEKRLGTDEKIFIRVFTERSWAHLASVSSAYHHMYDRKLEKVIKSETSGNFEFALLTILRCAENPAKYFAKLLRKAMKGLGTDDMTLIRVVVTRTEIDMQYIKAEYLKKYKKPLAEAINSETSGNYRTFLLSLVGHGH

SEQ ID NO: 86498 - protein, 207 aa, Zea mays
  Coding DNA Sequence Number=SeqID_43123
MDERPDACAVASSTSSASVSSAEEDASIQDQLGGHGAFAPPAVDAAQPVPPRRRFWAWATLTARAAAPRLHEACGTAARGLVAWTRRGGAPRCLLVVSVGSVALVALSGLLILVFFVVAAATNAIAFSVVVSLAGAGGFLAVLLAFLAAMYVGAVSVAVFVILATTIATVVAITIATGWVAFFWFVWFTARECLSLTTKRRTGTTSP

SEQ ID NO: 86499 - protein, 102 aa, Zea mays
  Coding DNA Sequence Number=SeqID_43124
  Homolog annotation: Hit_ID=A3B342; Match level="QueryCoverage=90%, HitCoverage=33%, E-value=2e-13, Identity=47%"; Hit description =Putative uncharacterized protein
MYYKLRRSRRLDAVQSGCSALSIVKQGDLMGYYLADERRVHFVLQPNQESSVLGMSRVFDDYYIEDRGVILMTQEVTQRRTDNNDQFVILTTIGIAFMPTCL

SEQ ID NO: 86500 - protein, 92 aa, Zea mays
  Coding DNA Sequence Number=SeqID_43125
  Subcellular localization annotation: CTP_CleavageSite=45; ConfidenceScore=5.08e-01
MAIDHVRVFCPSPPTMTHMHELACARPSTRHLQPPRRPSFLGQISTSYRERVTPGFKEQSRVHFIYAPEKTTHIITECIEINVINIINVLIT

SEQ ID NO: 86501 - protein, 301 aa, Zea mays
  Coding DNA Sequence Number=SeqID_43126
MARVEAAAIPTRSTSEGEEAATGSMAGGELAAAGSMLEEGKVRRDPWPGVVELAATVSTTEGEGVPTGSIFAVRRQQHVVKQAGLEFHCVKVVSRHLVALSIRCNLALKCMCDVCALTEMNECEMSGIISSPMVKLIETFAVFCKSQRAAYREKVLIEAEKQFLHDFTFFKEKLLVDFGQIVDVECIDSTCQVLCDKVRGCCSICKSRCTEAIIDSLKNLAEAMTIKHQKFLNSNNLLAKDMDIKSDEKATKIDTNVQPVDVKSNEKGAGVGIVEASHGKAHVVITNPLISSAHTVGDTNR

SEQ ID NO: 86502 - protein, 45 aa, Zea mays
  Coding DNA Sequence Number=SeqID_43127
MQGSCLTAIAAKSTKDLPTLTTPLLPLPLSAIANYPSDSGVNKGL

SEQ ID NO: 86503 - protein, 103 aa, Zea mays
  Coding DNA Sequence Number=SeqID_43128
MEKRREELAAEQQREDEQEMRRVAECREEKEKKLERACRAKKAMEENPEELAAEQQREDEQEMRRVAECREEKEKKLERARRAKEAMENPGAFSKGKWPHCTE

SEQ ID NO: 86504 - protein, 157 aa, Zea mays
  Coding DNA Sequence Number=SeqID_43129
  Gene Ontology: Mol. function=hydrolase activity, hydrolyzing O -glycosyl compounds; Cellular component=extracellular region; Biological process=cell wall organization and biogenesis
  Homolog annotation: Hit_ID=A3BYJ1; Match level="QueryCoverage=89%, HitCoverage=44%, E-value=5e-32, Identity=47%"; Hit description =Putative uncharacterized protein
MTTSRQAYRIDKDNPGSNLAGETAAALAAASIVFRRSDPHYSHLLLSAGNWAGPDQPGSSPLCFVPNGFGPEKSKQFLGRAVPARSLFEFGDRYRGTYDSSIAEARSYYASVTGYRDELLWAMTEFSWDVKYAGVQVLTARAGNGCLEIRIIRIRIR

SEQ ID NO: 86505 - protein, 174 aa, Zea mays
  Coding DNA Sequence Number=SeqID_43130
  Homolog annotation: Hit_ID=A2ZXR6; Match level="QueryCoverage=64%, HitCoverage=26%, E-value=3e-31, Identity=64%"; Hit description =Putative uncharacterized protein
MEAAASAEYGYYGGGAGPHETKTAGCGDHFVVDDLLALPPYDDEEEGATGETPLCLQPVKEEEGGLGNFSADSSIVVTAIDSCSNSFSRLADDDFPGEFYEPYDQLVELEWLSNYMGEGEETFAAEDLEKLKLISGGFSPAAVNVSAPSPVGRSFSPPLRHSPGCSCRVPGKGP

SEQ ID NO: 86506 - protein, 52 aa, Zea mays
  Coding DNA Sequence Number=SeqID_43131
MVALREFALGRGRRGMAEAGAGKKELGRAFYRCAREGGAVELLGSDNLGARK

SEQ ID NO: 86507 - protein, 136 aa, Zea mays
  Coding DNA Sequence Number=SeqID_43132
MAPRTLPDDGGSRPPYGSKRTTVSTTVAKWFVPDCTRDSGQDLQTTPQGIAAEVWTYIRAVERSGLEGSDESEFSSDEEDSDGGEDEDDDDDDGDDDDGGDGDGDGSGGKGSTRGGSSTGSTRGGGGKGSSSKAIG

SEQ ID NO: 86508 - protein, 116 aa, Zea mays
  Coding DNA Sequence Number=SeqID_43133
MAPPVDVAGPRPRLGDVEAPPRSRSSPSSVAEVESEPLGRARRRPLAEARAEFEPWVGRSGPESKPWVGRSGVRRLPGLSPSLSPGSGGAEFAVFRGLARVRALGRAERSSPSSGA

SEQ ID NO: 86509 - protein, 97 aa, Zea mays
  Coding DNA Sequence Number=SeqID_43134
MARVIELRVKRENENLGQMPGRCPYYRWQREYFEKLVKERLIALLFDDWEEDDGEVDSKKKLEGNVELCQYSSQIIENRKQSHHSIVETISIHYIPT

SEQ ID NO: 86510 - protein, 92 aa, Zea mays
  Coding DNA Sequence Number=SeqID_43135
  Homolog annotation: Hit_ID=Q6J9V9; Match level="QueryCoverage=70%, HitCoverage=22%, E-value=6e-21, Identity=76%"; Hit description =Putative uncharacterized protein
MVEQGNGLEQSQSIPRFISNVGQTLFYRVNNSYFVLQAMVIWGNDRRMEFDRDAKILRNNFVIDLLSCEDNSCRYAIPANIQQRLINIAKMD

SEQ ID NO: 86511 - protein, 620 aa, Zea mays
  Coding DNA Sequence Number=SeqID_43136
  Gene Ontology: Mol. function=protein homodimerization activity; Cellular component=integral to membrane; Biological process=Golgi organization and biogenesis
  Homolog annotation: Hit_ID=Q5JLY8; Match level="QueryCoverage=100%, HitCoverage=100%, E-value=0.0, Identity=56%"; Hit description=Golgin- 84
MASWLKVAEDLLEVVDRRAKIVATELSDEQSTSQPSGPNNQEVQAKKGKPREKGPLKLTNADGGNKISAQKEKRSRQRPRERMKIEKIRPSPPAGSSSVDTSASEPEVTPIDVKEVGNEGTLEKGEKGTDGLKTDGSGIVNTMVEVQLMQKNSDNATLDGVTHTNSEIAVESYFSVMDAKSESSSSNQTSEIGSVINLEERDSTVAVIQDTNASELPNTEVTGKLQESKKASVSDSSESIEDRRKQKSDTISVKEQDQLEEAQGLLKSAVKTGQSKEASEKRQLTLECQWCTGTGEEALGAALHGDPKKVVERAQVLHRELALQGGDLSLEEDGTERCEHDVEDIDGLKRNCELTETRVIQALREELATTERRAEEERIAHNATKMAAVEREVELEHRAVEASSALARIQRAADQSSSRVLELEHKLAVLEVECASLQQELQEMEARNRRVQKKPSEEANQVLQMQAWQEEVERARQSQREAEAKISSLEAELQKMRVEMAGMRRDAEHYSRQEHVELEKRYRELTDLLYHKQTQLESMASEKAALEFQLEKSLKQFHEVQAERSKATRRSASSWEEDADIKALEPLPLHHRHMATANQQDFASREGTSAMGDLASANLP

SEQ ID NO: 86512 - protein, 192 aa, Zea mays
  Coding DNA Sequence Number=SeqID_43137
  Gene Ontology: Mol. function=calcium ion binding; Cellular component =spindle pole; Biological process=regulation of light-activated channel activity
  Homolog annotation: Hit_ID=A2Y608; Match level="QueryCoverage=61%, HitCoverage=76%, E-value=6e-37, Identity=70%"; Hit description =Putative uncharacterized protein
MAEKLTPEQVDECKEIFDLFDADEDGNGLAGRIATGELVTALCSLGQNVDEAKARRFLEDAVATGAGDIDLAAFLAVAARKMGARQSEARLAECFDVFDDACSGSIPTEQLRQVMVSHGDRLTEEEGLRRGRGRTDCGGFCSGRREAGAVYNRDLIVSRDYRAMSAHPLALQRFPLYHSFRLPTPESWKWNP

SEQ ID NO: 86513 - protein, 325 aa, Zea mays
  Coding DNA Sequence Number=SeqID_43138
  Homolog annotation: Hit_ID=Q8W0Y2; Match level="QueryCoverage=13%, HitCoverage=1%, E-value=5e-07, Identity=64%"; Hit description =Putative gag-pol
MDEGTPLGGLEPEDNTEPSHGLHAVLSSLWGRGHLAHRPGIRWATWCFGCDKTPEVDTSSRPPWEGPFVIAKVLKPGTYKLANSQGEARILTAKGSSSTLGVDNTFGEVRPSLGRRRGPRVSALKDNVITKPGPSPPGSSPRIRPEQAARPVTPGPRPAVPQGHQPGPRPRQINSGVGPANGRPGQAPADQASTATMNKNTGIQDAITNGTPVPSPRIWTTSTPGKPAERQALGESPANAGRPKAHRQVLAPVLATQARKRTECCILAGQRQPASPNMVGGRLLRRTGGWSPPPEAGRGGGRPARAGGTAPAQPGLHPSEDDEHP

SEQ ID NO: 86514 - protein, 58 aa, Zea mays
  Coding DNA Sequence Number=SeqID_43139
MEQFEHGVCTHQGSTLLPSENTNASSMENGEPGCRGICSTIAGTVEDSLAARAARPSL

SEQ ID NO: 86515 - protein, 200 aa, Zea mays
  Coding DNA Sequence Number=SeqID_43140
MQDRQDALQQQLLQDRAESRAFMALMLQQSGVSVPPVQSAPPPPLHAPVVPSILSGPPVGTSPLRPVTLAFTSPVLSSVCPQPPVPPASAVTTTAVAVSVTSSVPAAPAARPQSESVPAPASTADPGSETDSDPPPAFALLPRPRPDAPPPPPPASEKPNSPPLLGIVFLSTSFDFTLQSPTFTRIPDAEKRKQPSKAKP

SEQ ID NO: 86516 - protein, 55 aa, Zea mays
  Coding DNA Sequence Number=SeqID_43141
MRAVSQRLVAHRTLVSGANGRLTWHAPDIYCAVSGGAPDCPVHPTTESCCFLSNG

SEQ ID NO: 86517 - protein, 93 aa, Zea mays
  Coding DNA Sequence Number=SeqID_43142
MHVVVVACVPDLHLHICRMYRRCKSAKQRNDPLTETAFDPLPLPRGVFQCLFVFVAIFGRLTRPRIMTPIDSGIGSLPKIHGVNPPITKVYKT

SEQ ID NO: 86518 - protein, 322 aa, Zea mays
  Coding DNA Sequence Number=SeqID_43143
MVVQFCRAERFLFLRAIEGVVYWIEQVVAYAHTVEGIQENDVCMATIIDEYFVQIPPCDSTIYHQRVYMGCTAEVDISCIKVVGEVVRVGLDVEVVEVAMIEFLDVEGAVDVEKDCGFDAGGNSGVHFEFDAGWLVGMSDDSLVVSWSGPSHSVLCCFSLWAVPGQVPAMKICGKGEAWSCGARGFRSSRCGWIFCVRSLAVDCSILGCLLGNFADKGFLAFLFSESCLRHVVRRGGGLRCRFVGIHCGIGNHVGGHTLLSIIMPPVTCFSPGIFPLGGHYNEVKYNMIKYTISLTPGRGLQMGMNGQRGAAWAHPTDDGLP

SEQ ID NO: 86519 - protein, 352 aa, Zea mays
  Coding DNA Sequence Number=SeqID_43144
MGMMKGCHPYHLLSGMIRDSLVYGRASGVGSAGLGVSRRIVPSYKDRVMMVGEHREDKEGECFVRFGHGGGLTPSGITVKRRRSLIGLLGLVIVSNLSLKRFGALQVDKGCLKGKYVVATTRKIKVEVKGTMKASGFLRASRGFVEELAETCAEPREVMTSPDLRKSSSRMLKVTEGEWHKNDPIPLASGEDYSMSCLARDFKIFPYGRNIGVVLTEVVEKDHQESTRKKRKAPLRLVDPWHDAKAPHPSAKGPTAAAAMPPPVVPVAAARRVPSPSRVDEVAEVKGVETGRELSVDDYLVEGVGMFDAQTGLPPDAECEAASGQTVVMPVKSVEEIALAKAAVATLLDPWV

SEQ ID NO: 86520 - protein, 432 aa, Zea mays
  Coding DNA Sequence Number=SeqID_43145
  Homolog annotation: Hit_ID=A2YHK3; Match level="QueryCoverage=51%, HitCoverage=22%, E-value=1e-11, Identity=26%"; Hit description =Putative uncharacterized protein
  Pfam annotation: Domain name=zf-CCHC; Domain location=125-142; Score =20.3; E_value=0.0013; Accession=PF00098.14; Description=Zinc knuckle
  Pfam annotation: Domain name=zf-CCHC; Domain location=144-161; Score =11.0; E_value=0.033; Accession=PF00098.14; Description=Zinc knuckle
  Pfam module annotation: Pfam domain module=zf-CCHC::zf-CCHC; Domain location=125-142::144-161
  Subcellular localization annotation: CTP_CleavageSite=39; ConfidenceScore=5.37e-01
MTVPLPPSDLPPPDASFTPSTGLSPALIPRPATTPLPFPASEVYPLGVQRGGRSKEQRWREDGGVCASSAASLVQDDVFRKSYKEALSSSKYAASRDDDGWVRVVRRRSSTLKPLPRPVPVDLRGRCFNCFSSEHRAAECRNRVRCFFCRLPGHRVGVCPHRRTTPPIPGRILVWRPVAKKSSGEIGYGLGMAGGQVAGSGPECFVGRCGRIDRAEEELCRALIVSVVRQEDSGYAAEVRDAIASRFCLEVGSLRLRRATPNSLLVFFPSVVVADQVVKGGQSLHAPPLRLHIRRWSRQAFAIGSGRSLVPIGVELRGIPAHLWGIESAEAVLGAFCLIHGLLPDSVTEEDMKRENRGSGHVVLRVARLVVMLVKRESRMMAPICAAFCNSVMADRSSPATVLHDLLLVVVRATSCCCMMCAKGVEKRIGWW

SEQ ID NO: 86521 - protein, 115 aa, Zea mays
  Coding DNA Sequence Number=SeqID_43146
MEKARLRPSWRQSRHRRTEMALEHGAPPEGGKREAHGPRHSEGRAWRERSQGEGRSVRLYRAHVERGQAGIEQPGQCAEAKNVSVKEGGVAAGESNVGIDVGGVRAKHCYGGIDE

SEQ ID NO: 86522 - protein, 600 aa, Zea mays
  Coding DNA Sequence Number=SeqID_43147
  Gene Ontology: Mol. function=ATPase activity, coupled to transmembrane movement of ions, phosphorylative mechanism; Cellular component=integral to membrane; Biological process=phospholipid transport
  Homolog annotation: Hit_ID=A3C4P5; Match level="QueryCoverage=90%, HitCoverage=65%, E-value=2e-81, Identity=42%"; Hit description =Putative uncharacterized protein
  Pfam annotation: Domain name=Hydrolase; Domain location=250-579; Score=48.0; E_value=3.4e-11; Accession=PF00702.17; Description =haloacid dehalogenase-like hydrolase
  Subcellular localization annotation: CTP_CleavageSite=45; ConfidenceScore=5.14e-01
MPMDTDERPLVELASAAAATTLAASSTSSAPFPAPATPGFSRAVRCNAPASSLPADGGAGAQPAYPENAISTTKYTPASFVPKSLFEQFRRAANCFFLVVACVSFSPLAPYRAVSVLLPLVVVVSAAMAKEAVEDWRRKQQDIEVNNRKVEVYDGIQSFHETEWKKLRVGDIIKVKKDEFFPADLIFLSSSSCDGLCYVETMNLDGETNLKRKQALESTFINQDQNMYCAESDKPARARTSNLNEELGQVHTILSDKTGTLTCNSMEFLKCSIAGVAYGSRPTEVETCYGEIVETNGSFGRKDTTEFKRSVKGFNFTDSHLMNGRWAKECSRDAIEMFFRVLAVCHTAIPVADGNSAGMPYEAESPDEAALVTAAREFGFEFYHRTQTTISVHEYDPVVGGKDYSSAKNSVHTDHVAAVEKVSEDIEKDLVLLGATAVEDRLQNGVPECIYKLAQAGIKIWILTGDKLETAATFEEIDRKLKDARGKISQKGTSTSFALIIDGNALTHALTGSLKNSFLDLAVNCASVLCCRVSPKQKALVTRLVKIRTSKTTLAIGDGANDVGMLQEADIGVGISGAEGMQSDYFLCMVIGVIVGLQLW

SEQ ID NO: 86523 - protein, 128 aa, Zea mays
  Coding DNA Sequence Number=SeqID_43148
MAHRRAWSTRAGGRSKSGEVDLGLPVKFCRVRGLVKLHGPLAELAEALARLGGGRSGLAMVAEVLAAVAGGKELAGAKEGWLDGDGERGRYGAQKSGLSPCSNPRQIQGFVVSRARVPMPSSGTRQRG

SEQ ID NO: 86524 - protein, 91 aa, Zea mays
  Coding DNA Sequence Number=SeqID_43149
  Subcellular localization annotation: CTP_CleavageSite=25; ConfidenceScore=5.29e-01
MAQSTVGSQRAVGAPDMSGAHRTVRCPLLAVGSATCPTQIARPTVGPADRWLTGQSGTIQEMVDGVTWPTTLPPGWTVEWDVAPAGDEHEE

SEQ ID NO: 86525 - protein, 532 aa, Zea mays
  Coding DNA Sequence Number=SeqID_43150
  Gene Ontology: Mol. function=GTPase activity; Cellular component =cytoplasm; Biological process=immune response
  Homolog annotation: Hit_ID=A2XMX1; Match level="QueryCoverage=99%, HitCoverage=99%, E-value=0.0, Identity=82%"; Hit description =Putative uncharacterized protein
  Pfam annotation: Domain name=GBP; Domain location=49-271; Score=73.3; E_value=7.7e-19; Accession=PF02263.10; Description=Guanylate-binding protein, N-terminal domain
MGRGRWASGIRAAALVLLAVAAAAGAAAGDPDPDELERAFPIVEPDHGHTKLRLSEQGLEAIRRIETPIAVVGVIGPYRSGKSFLLNQLLSLSCDKGIWIWGTPVEMDVDGSKVSVIYLDTEGFESVGKSNVYDDRIFALATVLSSVLIYNLPETVREADISRLSFAIEIAEEFYGRVKGQDVAFEPAKLLWLIQRDFLRDKYIDEVNQIRDSLAVMGNNSTAFSLPQPHLQRTKLCDMEDKELEPLYVKRREQLKQLVSSIVKPKIVQGRTLNGKDFVSFLQQILEALNKGEIPSTGSLVEIFNKAILDRCLKAYREKMDGLGLPVPVDKLQKLHEMANGDARILFDKQHFGKHHAAQSALKLEDDIKKVYRNLLLANEYQSSKLCEARFSECEDKMDHLQVLKLPSMAKFNAGFTHCNQSFVKECVGPAKESYERRMSKMLAKSRALFIKEYNNKLFNWLVTFSLVMVVIGRFVIKFFLLEIAAWVMFIFLETYTRMFWSAESLYYNPAWHIIVSSWETIVYSPILDLDR

SEQ ID NO: 86526 - protein, 181 aa, Zea mays
  Coding DNA Sequence Number=SeqID_43151
MVTTSSMVGRSESGYDLSPALSFKDLHHPCSGREQGCNIPSSVLAFVARTGVRTCRCALGRPTLAGAVLVDAAVGADVVAAGESFPADKPISATRGPTSVSLALMSGSRPLSGDANESLLAAASVLGPSLLLQRSLASHQEFVVPQALRCGGCSYPRGRNRSSVCNGTLSAGVLFIVAVGS

SEQ ID NO: 86527 - protein, 187 aa, Zea mays
  Coding DNA Sequence Number=SeqID_43152
  Homolog annotation: Hit_ID=Q6QP51; Match level="QueryCoverage=22%, HitCoverage=19%, E-value=2e-13, Identity=85%"; Hit description =Putative growth-regulating factor 1
  Subcellular localization annotation: CTP_CleavageSite=37; ConfidenceScore=5.26e-01
MKQAPSPPTDQGFESWPLRRVRQPPQSTRASSPLLIRGSKAGPSEGFDSRLEHSGSAPATDQGFEGWPLGRERFYNGIPPEGGIEPSGTIERVRVRENSAARPAPTAVPPARVKLTTVKFSLRRNRNLRLARPPGLGLNLGLGGWSPPRPTLGLGLNLGLGGWSPPRPTPRLGLERNRVLARPRPRP

SEQ ID NO: 86528 - protein, 212 aa, Zea mays
  Coding DNA Sequence Number=SeqID_43153
MSYLREVGMYMGRLPSVPCVAIIHEGATVFPYWGIRRNPASRLESAGAGHLGSEALHGAKFRLFERQGSSDVVHEAAKAGFETKRVVHAPQSTPEARRGLTMAQFGPIKAPLPESDGEGSLSRPSIEVEVLEDLSRVEDHQQALNAEHSSLCAAIDIVHDHLMIPWPEEMFAQISRMALIGDCICELEANTFRLESTMHWSLLDLIMRTRSS

SEQ ID NO: 86529 - protein, 64 aa, Zea mays
  Coding DNA Sequence Number=SeqID_43154
MQQDDPHIPAKRGRDGPQDQSIEKRKMIPTSVQKDGRLLPKKHRAVVSTLKGSPIVVPKLAGLG

SEQ ID NO: 86530 - protein, 134 aa, Zea mays
  Coding DNA Sequence Number=SeqID_43155
MARVACTVHGKRLDADIPPRTRKTARKSTGPIGVPRHQLAPRHKGSSSGNNDPIGDLEAQVEQLRTEQRHRNRVWVEDGQRMNELRADVRHLQDKLAERDLAIDWAVKSRSIAWDREAKARARMDELSTALDNL

SEQ ID NO: 86531 - protein, 101 aa, Zea mays
  Coding DNA Sequence Number=SeqID_43156
MATVSGKGKKIADTTSKEMDFDLRNLVGQELSEAEKRSYKNMAMEGSLEEIQAGNAKLSEELVQKSKSFEQAKKDLQTRYEAEADKNTKLQQSLKEIRTYV

SEQ ID NO: 86532 - protein, 347 aa, Zea mays
  Coding DNA Sequence Number=SeqID_43157
MKGIHPHHLVSGMIRDSLSLDLNSYGSNPRVMKAGEHREDKEGECFVRFGHGGGLTPSGITVKMEGSYVIRTSYCSEEEGFPHLLRSCALRMGIHKKPEYVWKEYRKHGIEKCSMVVYLGESRSYANHPPFQVTFIGHRFLDTCRSVAQKALKQLCQNYSREIFETPLHYFPPSKKNTPTWRKRLQALSGRDPTEDDPTIVYMVGYLHTLYNHYDDLSSHCTHLNSRVESLEQQVKKLKKEKASLQECLDIAEGEEANTREAYRTLKMDYDKKLKKLAPTKKIQKNTKNQGGQAERRRKAPPAPAPVRIENLSDVEDMSLASLDDLLKEFGDTLEKEFGSTSENARV

SEQ ID NO: 86533 - protein, 98 aa, Zea mays
  Coding DNA Sequence Number=SeqID_43158
MEATRKALEDLQAEHRAGVQRIAVWASEASTTLAEGGKLCRAVIEYVLTCFRSHDPAISLESVIAGPVVATEDAARESVQDVVELVAERFQRDPADDL

SEQ ID NO: 86534 - protein, 91 aa, Zea mays
  Coding DNA Sequence Number=SeqID_43159
  Subcellular localization annotation: CTP_CleavageSite=36; ConfidenceScore=5.04e-01
MSAAVVATRTYKLQYRSQENSVTYAAPTDVPPVRVRLTAAKSDLRRHRKLRLARPQGSDSTSTSEDGLRLARPQGSDSTSTSDDGLHLARP

SEQ ID NO: 86535 - protein, 46 aa, Zea mays
  Coding DNA Sequence Number=SeqID_43160
MACHGLIPCVGVWIVWLVLGSRSCSSLVFELGNDDSRCLCAGVVVV

SEQ ID NO: 86536 - protein, 145 aa, Zea mays
  Coding DNA Sequence Number=SeqID_43161
MSDDLVVPVHFEVGQELRFRLLDHPLLVLFELEPLRSRQKYVDAFSERQTLNKNRGGALCTGADGPRAGAGRSAAWCEARWCSLRKGGLSAAWGRTVRGLVRCWDFCLTAGRSAPWGRTVRTYAGTAEDRRRRLDLAPGRDPVGE

SEQ ID NO: 86537 - protein, 78 aa, Zea mays
  Coding DNA Sequence Number=SeqID_43162
  Gene Ontology: Mol. function=unfolded protein binding; Cellular component=prefoldin complex; Biological process=protein folding
  Homolog annotation: Hit_ID=A2ZLN8; Match level="QueryCoverage=56%, HitCoverage=88%, E-value=1e-13, Identity=86%"; Hit description =Putative uncharacterized protein
MAAAAASTPQGVAERRGIPAAAFVEDVEAYLRQVGLDVNSALAFLQESYHLWLGHYRFAICNGRSFCFGSNVLADYVV

SEQ ID NO: 86538 - protein, 41 aa, Zea mays
  Coding DNA Sequence Number=SeqID_43163
MAATASKTRRAILALFIWAMAILLFMAALHPNDFGTLPWVF

SEQ ID NO: 86539 - protein, 259 aa, Zea mays
  Coding DNA Sequence Number=SeqID_43164
  Homolog annotation: Hit_ID=Q84MR5; Match level="QueryCoverage=30%, HitCoverage=4%, E-value=1e-06, Identity=33%"; Hit description =Putative copia-type pol polyprotein
MDTHRAPHFDGTNFSYYTARMAWYLEAVDLGVWRVTRDRMKPPKNPEKLTASDEKEIHLNARAKNYLYKSLSIEIFNQDERQEEGSQAQAPQVKKKMMMKKEMVKRPYHPLRMKKWSDALKRGGEKARCLRLGMILQVKMILQGPAATALHHDHHVHHTNALSQKLCDKEGRKFYQCKAKTEGENKKKPTSEISNTYIDKVNKKADTPYLIKKKKNEKVIAIKANKQANKEKESQTHLVPKEIISTMKSTKKVWVLRGK

SEQ ID NO: 86540 - protein, 51 aa, Zea mays
  Coding DNA Sequence Number=SeqID_43165
MALAGAGNSGSTAEEGPSASFGTLAVSMYLGRTSTKNLLKGNQSPAFMKLL

SEQ ID NO: 86541 - protein, 122 aa, Zea mays
  Coding DNA Sequence Number=SeqID_43166
MALLDPPERLQSEVALSLVRNLLGWGVPTFAGRICAGAFPHGDLTAGEFVLFVSSRPSRLALLISPFFVLLLEELGLQPQHLTPCFILQAAIIAYLCKVSVGATLLPASSSSIQRKGCSPAL

SEQ ID NO: 86542 - protein, 128 aa, Zea mays
  Coding DNA Sequence Number=SeqID_43167
MGPGPRARGWGAAFGGDEEAHYRGRWRAPHVAVRLFRTRRPTPKQYDSWARAPVPEAGPLLSAETKRRITAGGGVLLTGRFAFIAHGDRHPRSMTRGPGPPRQRLGHPGVRRARSSAASRGVSGGIFL

SEQ ID NO: 86543 - protein, 151 aa, Zea mays
  Coding DNA Sequence Number=SeqID_43168
  Homolog annotation: Hit_ID=Q6J9V9; Match level="QueryCoverage=62%, HitCoverage=33%, E-value=2e-32, Identity=75%"; Hit description =Putative uncharacterized protein
MTASKRDRERRYFERVLLSKGNGPRALLLIRGLKVAPCGVQQPPQSTRAPSPLLIRGSKAGPSEGSDSRPRACRVRDDPGYVCYMTKARTTLPRFTARPRVPSGGGGAPGSPEAKLGPRPQPRPREEVFASPDLGLGLSLGLGRKSSPRPT

SEQ ID NO: 86544 - protein, 135 aa, Zea mays
  Coding DNA Sequence Number=SeqID_43169
  Subcellular localization annotation: CTP_CleavageSite=39; ConfidenceScore=5.19e-01
MRLSVVAWQAVPDPTTWTAPGPPRGQERQYTPRWRQWVRTPTGKCRTPGCTARTTGRGSGPPQHLMCPDRSADERRPGHPVGGVPVRSGDRQYARATAYTVLIITRTLPVKLPLHANTTQSADIRAQGDCSGDQH

SEQ ID NO: 86545 - protein, 159 aa, Zea mays
  Coding DNA Sequence Number=SeqID_43170
MEMAAACSQRDPTDVEPIGQAYEGGPHRAGVHVCTILVTKGRKTSPLRLGPMDRTYRDAPGVRKSTPAVARWLPPGRHISVTLKGPSQLGESLRDPSRFSTRHRDRSRPWVPYYARTVSSAWAPGRNVHFGSLLALCVDGVHILTLWPLLHRLVRILDS

SEQ ID NO: 86546 - protein, 123 aa, Zea mays
  Coding DNA Sequence Number=SeqID_43171
  Subcellular localization annotation: CTP_CleavageSite=39; ConfidenceScore=5.15e-01
MSEDHEQSREDASQKPYSPSPGAGSRRRRVPETCSPDPRSTSRVGRRELKGGFVNEESFSAETVKLNFRLELQVTPTHNLDNGLCLELQVLREWVSLEVMTSTWLPVVPFSGGAYTSYSKVSS

SEQ ID NO: 86547 - protein, 113 aa, Zea mays
  Coding DNA Sequence Number=SeqID_43172
  Subcellular localization annotation: CTP_CleavageSite=32; ConfidenceScore=5.05e-01
MSTSSSSAAATPPADASPPADASSEETLSTLVAEELRAGDTVDFGVSRMSSVRVQDMQRLGYFGGGVARVPGTEEVPEPEGELVVFEAFFAAGLRLPAHRFVGEVLGDSATNL

SEQ ID NO: 86548 - protein, 132 aa, Zea mays
  Coding DNA Sequence Number=SeqID_43173
  Subcellular localization annotation: CTP_CleavageSite=50; ConfidenceScore=5.01e-01
MSNSTTSRGRGGGGGVRPKPRGSCRASDDAAQAQQQLAGHTLTPPSPWLPASLVRGATLPPKYRRQLMGDPPPPAYTDTPPGSEWRYSLHLTQQANDERFDAFKQETSSRCALELTRAHAEATTLHYNYEFK

SEQ ID NO: 86549 - protein, 311 aa, Zea mays
  Coding DNA Sequence Number=SeqID_43174
  Gene Ontology: Mol. function=zinc ion binding; Cellular component =integral to membrane
  Homolog annotation: Hit_ID=A3A7B5; Match level="QueryCoverage=64%, HitCoverage=62%, E-value=3e-76, Identity=70%"; Hit description =Putative uncharacterized protein
  Pfam annotation: Domain name=MtN3_slv; Domain location=13-100; Score =140.4; E_value=5.1e-39; Accession=PF03083.7; Description=MtN3saliva family
  Pfam annotation: Domain name=MtN3_slv; Domain location=134-211; Score= 80.3; E_value=6.3e-21; Accession=PF03083.7; Description=MtN3saliva family
  Pfam module annotation: Pfam domain module=MtN3_slv::MtN3_slv; Domain location=13-100::134-211
  Subcellular localization annotation: CTP_CleavageSite=23; ConfidenceScore=5.02e-01
MAFLNMEQQTWAFTFGILGNIISLMVFLSPLPTFYRVYRKKSTEGFQSTPYVVTLFSCMLWIFYALLKSGAELLVTINGVGCVIEAAYLAAYLVYAPKAARALTAKMLLGLNVGVFGLAALATMVVSSAGLRVRVLGWICVSVALSRQVVRTKSVEFMPISLSFFLVLSAVIWFAYGALKRDVFVAFPNVLGFVFGVAQIALYMAYRNKEPAAVTVEEAKLPEHAKEVVVAAAAAEARASCGAEVHPIDIDIEATPTPVEEVHEPQVVVVVDVDVEPVTCAGAAEAAAGAGGRCVRRGRRAASLESWRRRE

SEQ ID NO: 86550 - protein, 155 aa, Zea mays
  Coding DNA Sequence Number=SeqID_43175
GYEIDGSGYDYGIGKWYSFRLERIQLLSVDRITLQARGHHLHNILYALPGGIFCCGYRTIDHRHQGYGRVMTPEARQYIFNHHSAELAALCLQAGPEDLIQAPEAIGDIVQHREASEIDAASSDTGLGLIPSGTSAVLALSAHSSMRWTPTRCSA

SEQ ID NO: 86551 - protein, 196 aa, Zea mays
  Coding DNA Sequence Number=SeqID_43176
MATLPTLDDSGVVIRQTSGRDPLHGIWISDALTGGPQPAGVARSANLSMAPSPLDKGKWATSGASTPGSSRGAEEERRRRLHRVDGSLVSEPPRSARGLQAQQVKAVERVQKWQQELEGKASDAALAEENLKAKEQSLDRRETDLARREADLTFREEMLTRRGELLAEHELEAEEKERKLEEQICQFNAAQAVSGT

SEQ ID NO: 86552 - protein, 154 aa, Zea mays
  Coding DNA Sequence Number=SeqID_43177
  Pfam annotation: Domain name=Rick_17kDa_Anti; Domain location=87-135; Score=4.4; E_value=0.068; Accession=PF05433.6; Description=Rickettsia 17 kDa surface antigen
MKRSSAPWDGEGLGRARPVQRDEHTGARRVEVGGLEKRSGAGERCVRQTEGRKCARPWQTQGATNWRSREGAAQARPWNRKARGMGECRELAMGAVSRGAGSSGDGEGARGKRAASAEREAGGAVAGAMAGDKTELGAGASAGHGGEQKSDRER

SEQ ID NO: 86553 - protein, 53 aa, Zea mays
  Coding DNA Sequence Number=SeqID_43178
MGLGVCNSLCQGGDENGGFGIDYGNGCPRYNHCSEEDEAVEEDFQEFQDYDEF

SEQ ID NO: 86554 - protein, 276 aa, Zea mays
  Coding DNA Sequence Number=SeqID_43179
MNKHRHSRCHYKRNSGSTPTATGRLSFASPLKGREPDIKAKEPEVGPQVALTASMAEKLSLAATTSATTAASACPPTPHQRTPAAPKRTGSSPSPAWLVDASSAELGDGFHPQKLEEEVVYRPAWELELWLASLSAPARMMKILEAEGGAEAVAQLASPHHRTGGHRLGKTKATRVFPVRGSGRWKDAMHEGSTKTWLPSKGVTLLLKATLPTCVLSRRGLSLLQHALRSSPYDTGAGSHASCKLAQDRRSQNRHARCAQLPSGYKRSSTFAQASG

SEQ ID NO: 86555 - protein, 296 aa, Zea mays
  Coding DNA Sequence Number=SeqID_43180
  Gene Ontology: Mol. function=zinc ion binding; Cellular component=PML body; Biological process=negative regulation of fibroblast proliferation
  Homolog annotation: Hit_ID=Q69XV8; Match level="QueryCoverage=94%, HitCoverage=38%, E-value=1e-137, Identity=82%"; Hit description=Zinc finger CW-type coiled-coil domain protein 3-like
MDIVRIRLEDLALDSKTGAMKLGKDAIVLTQTKSSRSVAFLSQSFNEEKDNLEIPVVAYRKEGQYMEVDLSVQSDATAEYNLNAIKNFSSFNEYFIGEKLGLFGEDTGTQIYIWNLDTWGTDYTLEWNSGKSSENPVHHGRGDILIRSRRVRSRPGQTSNKVLLDYSLQSYLEVMFLNPRMKISVQGSLVKSRPLAKTLNKTSVVSGEIMERTIILTLGRSKSYKRVGGQKHSTDMGRGVIGVADITNLIDDEDGNSWVLNNKQGFQDCEMYAKLEEWLGRKVDEYWDTKFDSLTL

SEQ ID NO: 86556 - protein, 152 aa, Zea mays
  Coding DNA Sequence Number=SeqID_43181
  Gene Ontology: Mol. function=receptor activity; Cellular component =mitochondrial outer membrane translocase complex; Biological process= protein import into mitochondrial outer membrane
  Homolog annotation: Hit_ID=Q8RZI8; Match level="QueryCoverage=94%, HitCoverage=49%, E-value=1e-28, Identity=47%"; Hit description =Putative mitochondrial import receptor subunit TOM20
  Pfam annotation: Domain name=TOM20_plant; Domain location=9-151; Score=51.3; E_value=1.9e-16; Accession=PF06552.3; Description=Plant specific mitochondrial import recep
MEMGGMSDAERLFFFEMACKNSEVAYEQNPNDADNLTRWGRRAAGAVAGPNPAPTASSFLKVFTFQGVVCLNFITIQSSHIGLHCAANAEAKLEEALQIDPNKSDALWCLGNAQTSHGFFTPDNAIANEFFTKATGCFQKAVDVYFHDLILE

SEQ ID NO: 86557 - protein, 553 aa, Zea mays
  Coding DNA Sequence Number=SeqID_43182
MPSSSSSADATPPAAASSEETLSNVMVEELRAGDSVEFGVSRMTSARIEDMQRLGYFGGGVARAPGTEEVPEPEGRVGCFRGVLRRRTPLACAPKRMVEDEVAQFGSCTFTPKTGKTTMPVVELVPCARNKWGNWNEFWFYVAEATVEGHEGLPVSEMCSHYYSAYPPFEVAEEDADEGALRCTAGQSSGRDLVEEFVAYGVWPLAHGWALGEVCPRQMPFHGGRVVRSPAFALNLRNRDPAAFVCDAEDLAVRLVGRYVPRTEGQRSFDIRGSNERLNRVFELNQLPYDGYPGQDEADRRGKKPAVETGGDPALAARRPPRKKRKLGSDEGPLALVVPGAAIAAAAPAPKAGGETLGAGGEVSALALVRDEAGVATRRLRGATEALSRATEALSQVADFTSRTASGALTAALSAEVERLRTQHADAVREKSASDSKCRKLAEKVAALEKEKADLRRQLAGERREANEAIAKEQAAQAEARLARAEGNIAKELAGELQRRLTALESRAEGAEAAMRAEAERTRTQLMTAYRELGVRTGDFEVLEREAGLRCLE

SEQ ID NO: 86558 - protein, 111 aa, Zea mays
  Coding DNA Sequence Number=SeqID_43183
MATALCASTLALVWLVLRFCLDGDHARDPTVQRENKKLVVRICVFGYADSEIVDSDSKKETDKNIEPTRRRGKVASINGSYAILEMRPVGMAILPAGTDIRGFHTRWAWIR

SEQ ID NO: 86559 - protein, 173 aa, Zea mays
  Coding DNA Sequence Number=SeqID_43184
MVKNFGSKTVQIAVNAVVTSHLLVCLYSAAVDRKDQTVTLQGGTDTISGNESFLGNELREGVFWTFGFPKLERIFSRFKLVTKNDLAPRKGLLLGPCFVAPKVLREEAASAEIVPRKWPKDAKIFRRNFIIELLRAPLNGFGSSKEVASPREPEPKPFLEKPEPCQRGPKLRG

SEQ ID NO: 86560 - protein, 130 aa, Zea mays
  Coding DNA Sequence Number=SeqID_43185
MRKKHGSVPKIHTCSGPDSHNEQKTDIQGTNNPTRLGGPAEQQKTDERLAVARSSSSDDDDFCSGGANSNNDDLRADAAAMRPSPMPSLETQGRAEGRRVGGQSMGGTGYLVGEGTSSSCRGGRRRRERL

SEQ ID NO: 86561 - protein, 165 aa, Zea mays
  Coding DNA Sequence Number=SeqID_43186
  Subcellular localization annotation: CTP_CleavageSite=17; ConfidenceScore=5.19e-01
MASSPVLTVSSIPLSPPSAYKKHPPEPRLHHTAPATSTIFSAEPFELAPSGSLHRSGAFGPSDRGILQEILELSLDTSHLGGGCQVLTDPTGSRGQPCPGIVGDAVLDVLGQMTHFSGRSLACPLLPDVLSELHKLSCFLIESGLHLADLLELCVLTPRRDWDHS

SEQ ID NO: 86562 - protein, 403 aa, Zea mays
  Coding DNA Sequence Number=SeqID_43187
  Homolog annotation: Hit_ID=Q6J9V9; Match level="QueryCoverage=35%, HitCoverage=41%, E-value=2e-16, Identity=41%"; Hit description =Putative uncharacterized protein
MATTQEVDPFLKATHPTRVLRRHGLSLHQRAQRSSPYDTGAGSHTSCKLARTEEAKPPRAERVTAQWLQALLHLRLIQWVKGRTTMQAACNCTTGMHPFDSNAPSMEAQAHTSCNRRAGYYVRKTAPPLTPILRLLDCGTGAATQGDPAHSPTVPTRRIGHGSVSRGRRRDDRYGQKWADSNGGSRRAEAAVKSSAGSRPLLGQQESPLPRHEDDAPGRRHLWQAKRATLHLRHNDRVKKGTGKGDTPKGILLCEGSGPRALLLIRGSKAGPSKGFDSRLRALGLRAHYWSEVQRLAPRKGQKPPQATRALRPLLIRGLKAGPSKGSTAASEHTELGMTLGTSDTWPSLGLRSQGTLGHFRDQQERFCNGIPSEGGIEPSDPIKRDRVRQITCRYFWSVPLGH

SEQ ID NO: 86563 - protein, 263 aa, Zea mays
  Coding DNA Sequence Number=SeqID_43188
  Homolog annotation: Hit_ID=A2Z7Q5; Match level="QueryCoverage=11%, HitCoverage=6%, E-value=2e-07, Identity=87%"; Hit description =Putative uncharacterized protein
MKAFFDSTGSLWEAQKLAGKGAGFFIITGTQGRGRGRRPRCLTEIHIYGFSSSCFTQGFMRQSIGVSTPGGPWTDEANALAVGGYKRLRGREEEPEPYVHVDVAVGEGNDVPPCGVVGPSPRSGEARPSFEVEVESEAWGRARQRPSSEVEVESEPWGQARRSFLWRLRLDSVAVSLTLAGGTAVGVVQAALFSCQVSQWRGEMTAVTSALSTEDVRQDKVLDDPCIECSYDTIGWRGDLAKVASPRSLPELGLGQVEGAPVA

SEQ ID NO: 86564 - protein, 179 aa, Zea mays
  Coding DNA Sequence Number=SeqID_43189
MKQCQVEDANSSSDGHEEEILGGGDNSTPDPSSIVKGKRKVLHDSPKPKKKRDVKEEYMKRLVKAYESRSLCSNMSITSFENDPVRKEVAAQLQQVIEDGSPEGSDLHFFATHLLMEKRYRDLYVFEQCHCVNHIGFQQMSEPDTDSYDDERDGELLVATFCCGHMGELASGFRRRTMV

SEQ ID NO: 86565 - protein, 136 aa, Zea mays
  Coding DNA Sequence Number=SeqID_43190
  Subcellular localization annotation: CTP_CleavageSite=55; ConfidenceScore=5.11e-01
MDESCTQLLSSDPMINLNTTVFFFVYSFPFARNLHNLGVSRPYNKDQGVPFIAPRQLGAVGGILGRQFLPSVGWRTGQSGAPPDIPCSLSGADRLPELAQPTVEYLEPLAHQTLSGAHHTVRCPHQTVGSATLKGN

SEQ ID NO: 86566 - protein, 60 aa, Zea mays
  Coding DNA Sequence Number=SeqID_43191
MGAPGQSRCATGTPVPVRQLRHPTQWDSEPLELLTSGPTGTVRWCTGQGPVECPTTVGAK

SEQ ID NO: 86567 - protein, 55 aa, Zea mays
  Coding DNA Sequence Number=SeqID_43192
MGKPVPSLLMLLLSRVTALAPTITGMGDHVSGRVRGYVHCQVHSVGYYLSLQSVL

SEQ ID NO: 86568 - protein, 139 aa, Zea mays
  Coding DNA Sequence Number=SeqID_43193
MAGSKKGKRGRHRADGKRKRPLSPPSEDFGDSKYSEERGRTGDPSSARLGGSDDSKEASSEEVEDSSDSKEWSDDEGDSSSDYDDDKGSGDYGGEGSGDHDDVEGGGDDSDGKGDDGKGDDGKGDDGDDGKAGGIMLPA

SEQ ID NO: 86569 - protein, 39 aa, Zea mays
  Coding DNA Sequence Number=SeqID_43194
MKHLRTSPQQRDIWSTMFWLIQAVQRILYLLRPSDRCKS

SEQ ID NO: 86570 - protein, 165 aa, Zea mays
  Coding DNA Sequence Number=SeqID_43195
  Gene Ontology: Mol. function=metal ion binding
  Homolog annotation: Hit_ID=Q6AUI1; Match level="QueryCoverage=20%, HitCoverage=8%, E-value=7e-11, Identity=90%"; Hit description=Unknow protein
  Subcellular localization annotation: CTP_CleavageSite=76; ConfidenceScore=5.58e-01
MSRITTVSPLPPRSLSPRQAFGRIGVASLRCQRRTPPLPPQCFRLLAGLSSALNKRTKTMPMRGVDFKWNGIMITSEMHDSKLPEEGQKWGFLIWLLFSYCGLACIAFVAIGKMLQVIRIVISIEKGTLSWCLRFTDASSGLEILGGVMPIEFQQAFAKLHLRKR

SEQ ID NO: 86571 - protein, 23 aa, Zea mays
  Coding DNA Sequence Number=SeqID_43196
MAAAGVSGALYAKAVRFRRWLMV

SEQ ID NO: 86572 - protein, 39 aa, Zea mays
  Coding DNA Sequence Number=SeqID_43197
MDTKSKVMNDASASSHLRRLRMSGAEKANNFNGITPKPR

SEQ ID NO: 86573 - protein, 76 aa, Zea mays
  Coding DNA Sequence Number=SeqID_43198
MKTLTTFGGYHPLEMVMHTLGLFPAEKKDDPMWWNHALQSDVMAHLANITQTTKLTLDSQEDFVVDLSSELVERDL

SEQ ID NO: 86574 - protein, 306 aa, Zea mays
  Coding DNA Sequence Number=SeqID_43199
MAERYQLPRSCIPPTMRRKDGGYPPSGGLEGGKTRCIREREDMVAFQGGHPPFKGDYPYSRPQPSRAESSPTRSKALLCGAGAGSHMSCKPAQSRRSPNRRARRHATVPSGRASPTPNTPSLEAQAHASCNRRADCFVHATAPPLAPPPHLLNCRTNTATRGDPAHDPAAPAWRGAARARATTAPPTTRPVALTPRRDRRRLWQEKRATLRLRHNDRASKGTGKGGYPEKGPFPREGTRLRASLLIRGSKAGPLEGFNSRLRSRGALHPLLVRGSKAGPSKGSTAASGYSGSVPITDQGFEGWPPK

SEQ ID NO: 86575 - protein, 245 aa, Zea mays
  Coding DNA Sequence Number=SeqID_43200
APPTPPLSALAPGVAVGGDPDDGGGDDSSSHDTDLSADQEPEGWVVRPITRDAARGCHFHDALDTLLRWALDRPTWSIEYRCVVFQHSRGVYQTVGRRPAWCAVRRTVSGVRRSTQSTIPSRRAAKQDAARRALSHYCSVLGGVADGLNLKYYPRRPSSSTGGMIVSPVGEDNPRLSSTVNLAAVLNTELDHALDELSRAHAEIAQLRAERVEHRHQEDGFPAPVGTQHPYLSPRRGHQSYGNPD

SEQ ID NO: 86576 - protein, 380 aa, Zea mays
  Coding DNA Sequence Number=SeqID_43201
MNKTSAFKMPSQTELRSRPHGNSSPSPAWLEDVSASGLEGDCHHQKLEEEVVRRPAQEVEPRLASLPASARMANTLNTEGGIGVTARPTGERGGQPRRRHATAPSGRTSPTPDTPAWRPRPTRRATGTPDAACKQLPRLRHHRASSIVEPTPRLEATQRATQRRQPDAAANAAKGGPAVMTVAGAREQRSRRQPSSRPIRGQRESPLSRHEDNTPVIRSSNGPRTRNGSPASYSPHRINSAAGQAALLAGKAGDASPSPKQPRQKKGPGKGDTPKGILPREGTRLRASLLVRGSKAGPPKGSTVASDRVGPTPTTGQRLAPEGFTVAPDAEQGMTKDPAPAKSLTASTYQPENLGPDRAPGLRPVRMREQPDLLKRYARH

SEQ ID NO: 86577 - protein, 54 aa, Zea mays
  Coding DNA Sequence Number=SeqID_43202
MGLKTMSTKCTFTSFTRLREKTLKDMLAFGNQDVEIKVVLHGRILGLGDNFFLY

SEQ ID NO: 86578 - protein, 94 aa, Zea mays
  Coding DNA Sequence Number=SeqID_43203
MEVHDLRAERESRLVGGNENDGLTLTMVMVVCIATTAQEKMKPWKEISRSSKITTSSRRGLAATPSRLPVKAACIYVSFPHFDYCEDYVDVSDI

SEQ ID NO: 86579 - protein, 140 aa, Zea mays
  Coding DNA Sequence Number=SeqID_43204
MTSIPRPARSRRPRRRIDLRGELQIPPGFGRESAEPDTWRGGARGDATRRNDDVERGQAPTNAGRNGNRALADADVRKKAEDAEAKRKAEEAEAEARRKKEDEEWDADLAAYYQEQWATEDEGAAGAAAAAAKTAPLAAV

SEQ ID NO: 86580 - protein, 144 aa, Zea mays
  Coding DNA Sequence Number=SeqID_43205
MGKRKGAVGKGPSRGGALAMELLLGAIHGRRVEEGGAEPMEEQDAMGVAAREMVLCLLPCGREDGMGESTYLSSDQRRSMRVGCLEEGSSPRPPGRNRTGRRAARRGMHGQPSAMGKLGRGRWLLAGRRVEGGRARGGQSKGGR

SEQ ID NO: 86581 - protein, 275 aa, Zea mays
  Coding DNA Sequence Number=SeqID_43206
  Homolog annotation: Hit_ID=Q6JAD6; Match level="QueryCoverage=100%, HitCoverage=44%, E-value=9e-89, Identity=56%"; Hit description =Putative uncharacterized protein
MSTQIALRVHRLLNLPAFLLATSVDSEVQLSYLPRLLTLLTTSSRYVEEWVRVFYASVWIDPDHQWMRFYFEREDVTIHASQIRQLFGFPESSTRLHSLCYGTSDRPRRPHGGVAPATAHVMALFRPAFIDGSRRSPADFIPVAKYLYQIMRRTLLPWMGYREANTHIQLWLLGALISHSEFDVVDFLISLEDPVPVPDPMIDTQAEDASFHQFETQGTTVPDDDDDDFWIPPSPPPPMPPRSHDHEAGSSSAAPAGPPAIDPALAMILQSLTQQ

SEQ ID NO: 86582 - protein, 161 aa, Zea mays
  Coding DNA Sequence Number=SeqID_43207
MVLWIEIRVGRDNLSSLRRHVDRSGPSKKASLNPEACANVDNKGPFRLSEVDGQNLDDLSSKHTQTHNILLSETFDKRATVRGKTDAHVPTATVDGHSPTKYSTYERVDVPDTIARLVMSKSRPGETSAWQPMDRSLDSQQMDRGSPFHSLRHLRSDVFLK

SEQ ID NO: 86583 - protein, 75 aa, Zea mays
  Coding DNA Sequence Number=SeqID_43208
  Gene Ontology: Mol. function=binding; Biological process=ethylene mediated signaling pathway
  Homolog annotation: Hit_ID=Q6K4K9; Match level="QueryCoverage=61%, HitCoverage=7%, E-value=1e-12, Identity=78%"; Hit description =Phosphatase 2A regulatory A subunit
MELRCCIRWSVSIMCGFHPYDVHEDQRNSVRLLAVEGCAALGKLLEPLDCVAHILPFIVNFSQVQSSCPYHLYYS

SEQ ID NO: 86584 - protein, 221 aa, Zea mays
  Coding DNA Sequence Number=SeqID_43209
MSGHRIDVGLSLSPSSPSLRRWGAAGQLHLAVVLTWSPVLGASIVDLGVHIRDSVAPGAVSRCENCSSEQGIAARLTSIVVYAPIHAIHGNNALTPCAIVLSTCSNRQFAFWSILPSAVVAPANSLPGPLGGAAAPRLKMVNTMKGGGIDLPANPHNRRVLRRQQQQQAEMNPPNPSPVGADPAVAAQMHIMQQMADTMADMHAHMRQERQEMCQEREEMR

SEQ ID NO: 86585 - protein, 326 aa, Zea mays
  Coding DNA Sequence Number=SeqID_43210
MAADLDPEGERRQCTCAVAVVPRPVAATTLPRRAVPEVTRSGVVAAVPRKSLLLIKALRVACHFWFCHPNSRPAPCEISKILAQRALRKSPKFPPNAPANSRPAKISGAARIKPRPFQPPRATQCNNQSLAHMARANVYKPHYAYFTSRYGTNHICKENNTTVPVSWAKCLVRPILQLCLEQPILQRRTPAVSLHSWVTSASATSRPTARTAPLPRLPSPRSPLLHLECAGVPLPHFADARDIRNRKRPFLLPSSGAGGPRRPPPPLLPSSISVASATCLGRASAEKEQVLGMQSVTRELARCCKVSSKGADAELDCYSCSGVLRG

SEQ ID NO: 86586 - protein, 170 aa, Zea mays
  Coding DNA Sequence Number=SeqID_43211
  Gene Ontology: Cellular component=nuclear pore; Biological process =transport
  Homolog annotation: Hit_ID=Q10R44; Match level="QueryCoverage=52%, HitCoverage=13%, E-value=7e-17, Identity=40%"; Hit description =Nucleoporin family protein, putative, expressed
MQIQRLLSSPYLSNTIAALVSAEDHAETTHFRLPASAYEALNEIVRVIIQKLSSTDAKSIISQTTDQLMLTIRRSGGSQSALENHKYEIADWDLGAGIYIDFYVLKNLMACYSKMAEELCALLVDTPSETLNLLMGCLLTMLNAPVPDESRSSYLQDTLSVFTEILCSDP

SEQ ID NO: 86587 - protein, 834 aa, Zea mays
  Coding DNA Sequence Number=SeqID_43212
  Gene Ontology: Mol. function=hydrolase activity, acting on acid anhydrides, catalyzing transmembrane movement of substances; Cellular component=integral to membrane; Biological process=copper ion transport
  Homolog annotation: Hit_ID=A2X210; Match level="QueryCoverage=100%, HitCoverage=64%, E-value=0.0, Identity=90%"; Hit description =Putative uncharacterized protein
  Pfam annotation: Domain name=E1-E2_ATPase; Domain location=388-628; Score=297.9; E_value=1.9e-86; Accession=PF00122.11; Description=E1 -E2 ATPase
  Pfam annotation: Domain name=HMA; Domain location=111-175; Score =66.9; E_value=6.6e-17; Accession=PF00403.17; Description=Heavy-metal- associated domain
  Pfam annotation: Domain name=HMA; Domain location=37-101; Score=44.2; E_value=4.6e-10; Accession=PF00403.17; Description=Heavy-metal -associated domain
  Pfam annotation: Domain name=Hydrolase; Domain location=632-822; Score=28.6; E_value=2.3e-05; Accession=PF00702.17; Description =haloacid dehalogenase-like hydrolase
  Pfam module annotation: Pfam domain module=E1-E2_ATPase::HMA::HMA::Hyd rolase; Domain location=388-628::111-175::37-101::632-822
  Subcellular localization annotation: CTP_CleavageSite=51; ConfidenceScore=5.21e-01
MERNGESHLKDPLLPTTSGASPAGASPRKERKTRKVLFSVRGISCASCAVSIETVVAGLNGVESIQVSSLQGQAVVQYRPEETDARTIKEAIEDLNFEVDELQEQEIAVCRLRIKGMACTSCSESVERALQMVPGVKKAAVGLALEEAKVHYDPNVTSRDRIIEAVEDAGFGADLISSGDDVNKVHLKLEGVNSPEDTILIQSVLEAVEGVNNVEWDTVEQTIEVAYDPDFTGPRLLIQCIQDTAQPPKCFNVTLHSPPKQREAERNHEIRNYRNQFLWSCLFSVPVFLFSMVLPMLSPFGDWLEYRICNNMTIGMLLRWLLCSPVQFIVGWRFYVGAYHALKRGYSNMDVLVALGTNAAYFYSVYIVLKALTSDSFEGQDFFETSAMLISFILLGKYLEIVAKGKTSDALSKLTELAPETACLLTLDKDGNAISETEISTQLLQRNDVIKIVPGTKVPVDGVVIKGQSHVNESMITGEARPIAKKPGDRVIGGTVNDNGCIIVKATHVGSETALSQIVQLVEAAQLARAPVQKLADKISRFFVPTVVVAAFLTWLGWFIPGQLHLYPQQWIPKAMDSFELALQFGISVLVVACPCALGLATPTAVMVATGKGASQGVLIKGGNALEKAHKIKAIIFDKTGTLTVGKPSVVQTKVFSKIPLLELCDLAAGAEANSEHPLSKAIVEHTKKLKEQYGSHSDHMMESRDFEVHPGAGVSAHIEGRLVLVGNKRLMQEFEVPLSPEVEAYMSETEELARTCVLVAIDKIICGALAVSDPLKPKAGQVISYLKSMGISSIMVTGDNWATAKSIAKEVGISQVFAEIDPVGKAEKIKDLQ

SEQ ID NO: 86588 - protein, 142 aa, Zea mays
  Coding DNA Sequence Number=SeqID_43213
MQHANTPTIVMEQPNTPLILRTIENTGAEMTAFSLCSKGNEKPAHASTADQSASAASPRPREATKGKQTREDGWNKRKPVIIQLNQKPVDEAAEAHEPAQEGAPPRSRTTAAAARSSRPPDPACCSSLPVPAAGRLPGVWGF

SEQ ID NO: 86589 - protein, 94 aa, Zea mays
  Coding DNA Sequence Number=SeqID_43214
MSLVSGGGSTSNPSHAMFALSSLLTFIEEKVESLGDGELALVSSRFTCCPQEGKQEAGPRNHYSSRCKGKQEYTSGKHKSKGGFNNKALKKKYL

SEQ ID NO: 86590 - protein, 286 aa, Zea mays
  Coding DNA Sequence Number=SeqID_43215
MALGDDAMSDDCQDIGDVSDSAGDLAAKVEELTTALASQDKLLQLVAHESKEFKFKYESTLRELEPARASVMVSGETECDECALHMSNITTLHTKYATLLDECDELRSRSSLLGFAAKDGSVACFGKIGEWSGLKPLEKPLATPKIIKITPPKPTTPVRDGVIEKPSPSTVQKESPHPQQIPPKRDVRFHCEYCERDGHLAAFFFRRKRDDRLVSESSRKNMDHPSHGVHDPPVQIRPARPRGALPLAARPQVVRPRGGHARRGAGHVPYGQGPLGSGFGSYFPSG

SEQ ID NO: 86591 - protein, 281 aa, Zea mays
  Coding DNA Sequence Number=SeqID_43216
  Gene Ontology: Mol. function=oxidoreductase activity
  Homolog annotation: Hit_ID=A3AJL2; Match level="QueryCoverage=24%, HitCoverage=20%, E-value=2e-25, Identity=76%"; Hit description =Putative uncharacterized protein
  Subcellular localization annotation: CTP_CleavageSite=63; ConfidenceScore=5.20e-01
MARQQPERVPPQRRPVGCGGGWKRDGVCGSPPLSGGLFAAATSASSRSECRRSGVLSVVEPPRAPRRAVRRRGAPAAGPGAQGVVWRGALRRHPHALREGVHSLPRQARAARGAVGRHGDFDITYYRSCDPGQARLFEDVLEEVEQMGIFKYGGLPHWGKNRNLAFVGAARKYPGLPRFLRVRTPTTPMAFFLAVAANAAASCAQLFCLWSTTSVSEASAVAAKSLGTSGATASRGCSPVTSASSRSECRRSGVLSVAEVVGSAAGFAGGRAGGCGGGLHY

SEQ ID NO: 86592 - protein, 126 aa, Zea mays
  Coding DNA Sequence Number=SeqID_43217
MGKNNKRKREPTPPSEDFGDSEYSEEEFSSESEGSLAPTYIRAVERSGLEGSDESEYSSDEEDSPEEDSKGDDDDNGGDDGDDGDGGSRGGQRRQQGRRRRQRQGQQRRRQQQRQQQGQWLGATGL

SEQ ID NO: 86593 - protein, 38 aa, Zea mays
  Coding DNA Sequence Number=SeqID_43218
MASRAPWASLERPLASCWLKIRRRTGQNRAERGRKICD

SEQ ID NO: 86594 - protein, 335 aa, Zea mays
  Coding DNA Sequence Number=SeqID_43219
VAADKSDGGQCQTSFCQNEDGFPKLLRACTVRLGIRSQPEYDGREFVEHGTEKCVVTVYIGSSPHHVEWSVTAAGHRFKDTCQVVARKALRALCQIYEEEVADTPLRFFPPFHRNRPAWMARMRALEGQQLLEDDPTVVYLTAYLLTLDAQYDFLARHHRQMIARAEDAEKRNRQLHVDLTTAQARATTLESREAYLVTHNQRRALRIQEPAPSNPVQPINAEDPQILEGHPVSIRGEKKAWELPEGAIVLEGIPVFPQAMDKQEHPESSQDPPPELLEPLTMKKIPAPSLEVKEEAASTPPAPPPSEELQEPVPLEEEFDPVLPSQSPPEEVIN

SEQ ID NO: 86595 - protein, 91 aa, Zea mays
  Coding DNA Sequence Number=SeqID_43220
MGQWLGWGRGASNRTQRRGCLTSGATTEPGLSVSGMGQAQARARTDRRGLPGDDPEQREGGQRGAYAWDAGSTGQRATPKGQERVAAGKLQ

SEQ ID NO: 86596 - protein, 216 aa, Zea mays
  Coding DNA Sequence Number=SeqID_43221
MERLQKWQQELEDKASDASLAEENFKAKEQSLDRRETDLARRETDLGFREEMLTRRGELLAKHEIEAEEKERKLEEQICQFNAVQAPPEHRAGVQRIAAWVGEASTSLVPLGMSPIPVSELPASISDVLPVLDSADDHLWRLDQILGARLEAECGKLYQAVVEYVLTCFRSHDPATSLAPVIDGPVATTEDAAREGVQDVMEMVATRFQRDPADAE

SEQ ID NO: 86597 - protein, 202 aa, Zea mays
  Coding DNA Sequence Number=SeqID_43222
  Gene Ontology: Mol. function=chromatin binding; Cellular component =chromatin; Biological process=chromatin assembly or disassembly
  Homolog annotation: Hit_ID=Q7G6W6; Match level="QueryCoverage=77%, HitCoverage=48%, E-value=3e-10, Identity=31%"; Hit description =Putative uncharacterized protein OJ1136E01.1
MAGGNELARAKERWLAGEAATYQEFLSTQPPLFTKAEDSLDADVWLRVVESKFPLLTGDCPDEAKARFAAQQLCNPARTTSVLCSPLIGKCLGRNSRLLSEGTTSQLAFLIIFFTGTGLGRQNPVGLYHLCQYAGYHADSDEKKRDRFRRGLNTKLRERLNTVWADSFNELVNLAISQEDRIVAHRAEKKRKAPMAAPSAQA

SEQ ID NO: 86598 - protein, 237 aa, Zea mays
  Coding DNA Sequence Number=SeqID_43223
  Homolog annotation: Hit_ID=Q10Q33; Match level="QueryCoverage=82%, HitCoverage=60%, E-value=4e-64, Identity=63%"; Hit description =Expressed protein
  Pfam annotation: Domain name=Remorin_C; Domain location=129-237; Score=32.2; E_value=1.9e-06; Accession=PF03763.4; Description =Remorin, C-terminal region
  Subcellular localization annotation: CTP_CleavageSite=43; ConfidenceScore=5.04e-01
MSGDEFDLESSGAPDTVRWHTGQSGLARVCTSSCRNIVRVKVNISVRRPLKPAPGKPEDVPADHHKVAPRMLETSLGVRKGSGSSSRLADRKGSKEFEQEQAVQKAPSAVRPATSYRSGRNGEGAAGVAATGGTRSKADEWEKAKLGRVREEYEKMMETIAEWETEKKVKARRQKEQKETELDKKREKALEEYNLEMTRISKISGGARAMAEERKYNDGKKIREKAHKMRSTGKPPR

SEQ ID NO: 86599 - protein, 146 aa, Zea mays
  Coding DNA Sequence Number=SeqID_43224
MGKNNKRKREPTPPSEEFGDSEYSEEEFSSEPEGSPAPVSPPASSDDSDDSQGIATEVWTYIRAVERAGLEGSDESEYSSDEEDSDGGDEGEDDDDDDDDGGGDDSGRGGGDGGRDSTKGSSRGSTKGGGGGSAKGGGGGRGRASG

SEQ ID NO: 86600 - protein, 114 aa, Zea mays
  Coding DNA Sequence Number=SeqID_43225
MAHCYTSHCTPGPSPYAYKRKVQGSLTKRLAAREDETARRVPRSPPHTDACNPLLAKEMAMGKYPPGINTPYPYPRHKNNLIGSLIYSGGYGFTPIPIPMWVWVTHRVTRTHKN

SEQ ID NO: 86601 - protein, 75 aa, Zea mays
  Coding DNA Sequence Number=SeqID_43226
MAKPLPWCDASVEVTGRRVQLLYTERPSPGLRAMVNRGQIKTTAVASSVTLSHGEMSTSLRGFRDDQGNRRPREV

SEQ ID NO: 86602 - protein, 806 aa, Zea mays
  Coding DNA Sequence Number=SeqID_43227
  Gene Ontology: Mol. function=transferase activity, transferring glycosyl groups; Cellular component=endoplasmic reticulum
  Homolog annotation: Hit_ID=A3AUS4; Match level="QueryCoverage=96%, HitCoverage=98%, E-value=0.0, Identity=67%"; Hit description =Putative uncharacterized protein
  Pfam annotation: Domain name=C2; Domain location=248-337; Score=35.1; E_value=2.5e-07; Accession=PF00168.21; Description=C2 domain
  Pfam annotation: Domain name=C2; Domain location=412-504; Score=85.5; E_value=1.8e-22; Accession=PF00168.21; Description=C2 domain
  Pfam annotation: Domain name=C2; Domain location=80-161; Score=67.1; E_value=5.8e-17; Accession=PF00168.21; Description=C2 domain
  Pfam annotation: Domain name=PRT_C; Domain location=651-806; Score =379.1; E_value=7.1e-111; Accession=PF08372.1; Description=Plant phosphoribosyltransferase C-ter
  Pfam module annotation: Pfam domain module=C2::C2::C2::PRT_C; Domain location=248-337::412-504::80-161::651-806
MAYAYPYVFRAQAPPVSVEDHKAKDAAPAPQVKEQWPAGGSRSASPRGAGTGWPDGLGSGSGESQRLASAYDLVETMHYLYVRVVKVRGLPASAVTGGCRPYVEVRVDNYRGATRHCEGKESPEWNLVFAFSRDRVQATVLEVFVRDRDALGRDDCVGRVAFDIAEAPVRVPPDSPLAPQWYRLEGSAGGRMVANGEVMLAVWVGTQADEAFPDAWHATAASVLGGDGGAAVHNTRSKVYVTPKLWYLRVGVLEAQDVVPPGACATPDKGRHAEVFAKVQVGGTVLRTRPCTTRGPTNLAWNEELVFAVAEPFEDPAVLIIEARVHPGKDEIVGRALLPLTIFEKRLDCRPVQSQWFSLEHFGRPAPAVFAGRVHLRACLEGAYHVMEEPTMYASDTRPTARQLWRPPIGVLEVGVLGAQGLTPMKTVDGRGMTDAYCVAKYGQKWVRTRTVVDSCSPRWNEQYTWEVYDPCTVLTLAVFDNCHLGSASAGNGALRDQRIGKVRIRLSTLEMDKTRTSAHPLVVLHPSGLRKNGELCLAVRLTCLTLGSVVRMYGQPLLPKAHYVQPLTVVQLDSLRRQAMSIVAARLSRAEPPLRREAEQGQLLPRYGAPLSAASTVRWLADVCRWKNPATTVLVHVLFVTLMCFPELILPTMFLYMSTAGLWNYRRRPRRPPSMDAGLSCAEATHPDELDEELDTFPTSRPNAVVRLRYDRLRSVAGRIQTVVGDVATQGERIRSLLTWRDPRATALFTAFCLVAAAVLYVTPVRVVSLVVGLYVLRHPRFRGRMPSAAGNFFKRLPSQADTML

SEQ ID NO: 86603 - protein, 49 aa, Zea mays
  Coding DNA Sequence Number=SeqID_43228
MAAPAADERARLLVNRSASPSPARKGMQGARMRKDWKRSAGEADCMAVC

SEQ ID NO: 86604 - protein, 191 aa, Zea mays
  Coding DNA Sequence Number=SeqID_43229
  Subcellular localization annotation: CTP_CleavageSite=27; ConfidenceScore=5.33e-01
MAPPVTWSVRALGRARRRLLRGRGRVRAPGRARRRQSSKVKAETEPWGRARRSSSSSGAEPESEPWGRAKRSSSSSGAEPESEPWGRAKRSSSSSGAEPESEPWGRARRSFLWRPRARDRIRCQAILALNAPAIRSVGVTIWPRLLLSEDWVSGEPKGFEVMGHNTPLPVIPAPEGASGEEGATTEETPTR

SEQ ID NO: 86605 - protein, 412 aa, Zea mays
  Coding DNA Sequence Number=SeqID_43230
  Gene Ontology: Mol. function=acyltransferase activity; Biological process=response to oxidative stress
  Homolog annotation: Hit_ID=A5B1G8; Match level="QueryCoverage=98%, HitCoverage=17%, E-value=1e-149, Identity=64%"; Hit description =Putative uncharacterized protein
  Pfam annotation: Domain name=DAO; Domain location=23-378; Score= -50.7; E_value=0.023; Accession=PF01266.15; Description=FAD dependent oxidoreductase
  Pfam annotation: Domain name=Pyr_redox_2; Domain location=23-212; Score=-46.5; E_value=0.062; Accession=PF07992.5; Description =Pyridine nucleotide-disulphide oxidore
  Pfam module annotation: Pfam domain module=DAO::Pyr_redox_2; Domain location=23-378::23-212
MDPGKSIDDKFSKLHPSFPVDTRIGIVGAGPSGLSAAYALAKLGYHNVTVFERCHNVSGMCESIDIEGRTYDLGGQVIAANSAPVITHLAKELGSEFEDMDTHKLALIDSQTGNIRDLEVAEGLCIHGFSNAKITGQDEANRSGGVGIHAVSGLASDPTLDFLMQHGISSMPKSVVYGYTASGYGFVQDMPYAFIHEFTRTSMAGKIRRFKHGYMSLWDKLSQSLPFEVLCGTEVLRVKRNNCVASVIIKNNNDDVEVREFDKIILSGALPFKNGKTYRSLSMTDGENEVVELNDLERELFSKVQTIDYYTTVVKIEGFEHIPKGFFYFGEYMEDPTTVGHPVAMQRFFADTNIFLFWSYGNSADIKESYVAKCVTNVVTSMGGTVQRVLLQRRFKYFPHVSSEGIGWQGCL

SEQ ID NO: 86606 - protein, 88 aa, Zea mays
  Coding DNA Sequence Number=SeqID_43231
MAAGRSWGLGLQQWGSGAMEQEAEEAATKGREGGAVVGKGDGAESSQGGAPACSQGARPWLHCGRHGSRDTELALPCALRSMGRATLA

SEQ ID NO: 86607 - protein, 109 aa, Zea mays; identical to SEQ ID NO: 81351
  Coding DNA Sequence Number=SeqID_43232

SEQ ID NO: 86608 - protein, 260 aa, Zea mays
  Coding DNA Sequence Number=SeqID_43233
  Gene Ontology: Mol. function=acyltransferase activity; Biological process=response to oxidative stress
  Homolog annotation: Hit_ID=A7NZW0; Match level="QueryCoverage=98%, HitCoverage=11%, E-value=4e-75, Identity=54%"; Hit description =Chromosome chr6 scaffold_3, whole genome shotgun sequence
MISLIRFEQSDTKIDLSGCPVIAAKRSSPDVRQATKVTLARTWYQALWATLCQPLLQTLVPYFVVGLVIFLPLRGLLATMAAGVPLYWTLPIFWATSGVAAMGACAAAKWALVGRRADGDTVHIWAPPVFLDTVWQAVRTATEEYFAELTPGSVLFAWWMRAMGASVAVSDGVYVDSTGALLNPEMVHLERGASVGRDALLFGHVYEGEGGEVKFGRVHVGEDGFVGSRAVAMPGVRVDDGGCLGALRLAMKEEIVMNRT

SEQ ID NO: 86609 - protein, 1062 aa, Zea mays
  Coding DNA Sequence Number=SeqID_43234
  Gene Ontology: Mol. function=acyltransferase activity; Cellular component=integral to membrane; Biological process=response to oxidative stress
  Homolog annotation: Hit_ID=A5B1G8; Match level="QueryCoverage=97%, HitCoverage=49%, E-value=0.0, Identity=50%"; Hit description =Putative uncharacterized protein
  Pfam annotation: Domain name=Hexapep; Domain location=488-505; Score =13.2; E_value=1; Accession=PF00132.15; Description=Bacterial transferase hexapeptide (th
  Pfam annotation: Domain name=Hexapep; Domain location=691-708; Score =0.6; E_value=1.2e+02; Accession=PF00132.15; Description=Bacterial transferase hexapeptide (th
  Pfam annotation: Domain name=Hexapep; Domain location=711-728; Score =4.6; E_value=41; Accession=PF00132.15; Description=Bacterial transferase hexapeptide (th
  Pfam annotation: Domain name=Hexapep; Domain location=745-762; Score =10.0; E_value=9.1; Accession=PF00132.15; Description=Bacterial transferase hexapeptide (th
  Pfam module annotation: Pfam domain module=Hexapep::Hexapep::Hexapep:: Hexapep; Domain location=488-505::691-708::711-728::745-762
VVIRIVDPDYLTEHQEDGAEGEIWISSSSSGVGYWNNKETSQRTFCNWLKNYPNIKFTRTGDLGRIIDDVEKTVECSSDVLRPGCCAVVGVPEDVLTQKGISIPDSSDQVGLVVIAEVREGKVISEEIVDSIRTRVAEEHGVTIASVKLIKPRTISKTTSGKIRRFECMKQFVDNTLSLASGSRISNKKSLFRSLTTGTGMDIRRPFLKHTVDPTIRPQPRSKVKNLMEIIEFLMQLVSDQKVVRAAQKLSDFLGIPVGAIDIFTASCIADLASFLENLVLKSQPQLKPDVSHSAEDENPVITDTTDIDLSVFATGILQLLALTYVCFILLLPAYLASSMYKSMISSVSLVKSSLLSYLSSLVLAPVAWICYALFTSLSLSTLGKPFLQPNYILTPDISIWSVDFVKWWALNKAQSLAAKMLAVHLKGTIFLNYWFKMQGARIGSHVVIDTVDITDPSLLAVADGAVIAEGVLIQSHEVRNEVLSFRHVKIGRKASVGPYAVIQKGTVVHGGVVIPPLQKTEQGKSAYPPSGASAYTKDEEGTANIAFEHLVSIYAVGFLGALSGATVFMLYTRFSGTTASLQHFSFACVAGAFHWLPAVLAAYAVIVRETKTTKSPVEFALFIAFAYLSYGIIVSLLASVTNKALATRSGTKKKDVARLIQQRITIAAHLRFAKMISGTEAFCMYLRLLGAKIGRHCSIRAINPVADPQLISIGDGVHLGDFCNIVPGFYSKGFTSAEIKVRDNTVVGSGSLLLPGSVLQENVILGALSVAPQGSVLLQGGVYVGAQSLTLVKNTLLAEDERIVEMDPMYKKIVGNLAANLAITTMNVKSRYFHRTGVSGRGVLRMYQDIPSLTEHKIFGAGKSFPVIVRHSNSLSADDDARLDARGAAVRILSDDGEVPLLDLTLKSGKAFYARTIADFATWLVCGLPAREDQVKRRQADVCKVQARPADQAISEDSGQVVPRGILPPETGAIPRDEGDTRPLLFLADDFRRKVESPEGVRYVFQLQLRDVPADSATREIALDSARPWDEDEFPYIFFLRDKHWQQSLSRGERIQSMILL

SEQ ID NO: 86610 - protein, 167 aa, Zea mays
  Coding DNA Sequence Number=SeqID_43235
MSLTRGGPHDSGAAHESCRRRGSWAEGARIGPDSKPVQTLTQFYMCTLNPQYEISGEQSSPKFSGWYVDAVNGLAGAGFARAAPEPPHKARGRATATSAPTDTCRRSAGAFNARQSAQKSGTREQAHRTFYSSCLVRHRSSRRAQQQSSNGRNPNSRVTWLSHRTCP

SEQ ID NO: 86611 - protein, 228 aa, Zea mays
  Coding DNA Sequence Number=SeqID_43236
  Subcellular localization annotation: CTP_CleavageSite=26; ConfidenceScore=5.11e-01
MKTEVGVKDGKKAWASMFLKLLTMVNAAGKTKRRSRLVQELDTMASWRPTESSARGKELDLRKHKERDAAAMEGAVSYKTSAWVEQGLAAGNREQRLMLHDLNGEEARNRLELTATRESTSRPSTMVDDIHGEQSTASRELSRQQREPERDDLGAHQGSSAGRGTNPRHARGRELHSRRLHGRGWPTQGAGRHEKSGRAELGASQQRRWSRSQRRSVRERERRENDAV

SEQ ID NO: 86612 - protein, 167 aa, Zea mays
  Coding DNA Sequence Number=SeqID_43237
  Gene Ontology: Mol. function=L-ascorbate peroxidase activity; Cellular component=chloroplast; Biological process=response to oxidative stress
  Homolog annotation: Hit_ID=P0C0L1; Match level="QueryCoverage=57%, HitCoverage=31%, E-value=5e-38, Identity=80%"; Hit description =Probable L-ascorbate peroxidase 6, chloroplast precursor
WHDAGTYDKNIIEWPKCSGANGSLRFKVELKHGANADLVNALKLIQPIKDKFSSVTYADLFQLASAIAIEEAGVPKIPMIYGRVDVIALDNARQRGGFLLRILDEPTIKGIPSSGYRIAVDSSSKHGEVDVSHELASTTLAMNYQGNDHDFVHTFGVASPNKVSTNL

SEQ ID NO: 86613 - protein, 269 aa, Zea mays
  Coding DNA Sequence Number=SeqID_43238
QARSSHRGDTSVDPLRVPYAARVLVFARPALDHGVPRHLLGGGGGRGPWTQARQQSLLDFAQGLTAAATSSSISMPRHHRSTDSRVSGMDMDFTSPAATSTAAAATTTFEPPAAAVDVAGPLSAAAWRQLPFPPFAAASSTAPTPPCRSPPSPPAAAAALKRTAMAAARQGPAGAGADAAVEDRMDLLWEDFNEELARGLWPESSDYSSDAESEPAAARGCDPALRPSSRAGAARHCRRRAGTWVLLIRIFRRLFVIEKTVAAATARAS

SEQ ID NO: 86614 - protein, 360 aa, Zea mays
  Coding DNA Sequence Number=SeqID_43239
MVSVVVPGVKGSALSAGGEILAVTAVKDEAGTVSRRLREASQRLSQAADFADRVASGALTADVSAEVQRLWAQHADAVWEKSAADSKCRKLAEKVAALEGERTDLRRQLVEERREANQAIAKAQAEANLAQVEGSLASQRAEEWEVRFNALQARMERAEASMRSEVERTRKQLVDSYRELGARTADLKCPTERRAFASSSGCKKNWAMNALSHEGCSHYEVFDRSNEDFECEIFKVKDPVVKDSAGALFDRMWGPHGREVVRERSDRARDQAARAKNVEDFGPLNSARPEAEANPVAAEAEVDPAPPPETGEGSLAAPAATVSSGGSSPTVVPRVEDPPKAATEPAAEDPLAAAGSSQVA

SEQ ID NO: 86615 - protein, 266 aa, Zea mays
  Coding DNA Sequence Number=SeqID_43240
  Gene Ontology: Mol. function=carboxyl- or carbamoyltransferase activity; Cellular component=ornithine carbamoyltransferase complex; Biological process=amino acid metabolic process
  Homolog annotation: Hit_ID=Q8SA97; Match level="QueryCoverage=38%, HitCoverage=21%, E-value=9e-16, Identity=46%"; Hit description =Ornithine carbamoyltransferase
MAPPIDVAGLRPRLGDVEAPPKPRSSLSSVAEVESEPLGRARRRPPAEARAESEPWGRPKSEPWVGRSGVRRLPGLSPSPSPGSGGAEFTVFRDLARVRALGRAKRSFLWRLRQGLTACQSHSVKWYHSRSGAGGAVLLSGRSVERRSDGGHFSSGGSGTRVRIKGLGRAGNMFAAGGGPRARRKSSGLYADGGYQLRIRSLEGLNALRNALAGLVVPSCELAIARVYGQVPSSRAGAQRHTQKYLRVICRTRSPGDGVRGLDASL

SEQ ID NO: 86616 - protein, 278 aa, Zea mays
  Coding DNA Sequence Number=SeqID_43241
MVSPVSCKRVIRVDVRAPFVGGRLGAQRHAQKYLRQLARWLRDAWAWASKLACQKSEKRVHLARLHAACMAARPFRPLVWAKPPDGGYPPSFRLLVGGTQLRGSWYLSAIVRLQGFSSASPAAPPRWRSPRMMTTSSWVGKGKPGCDLGPTLSFKDVHHPCWGGGQAEPALDLPCGPAGHLLPQRSGEEALTGPAGGADLNNVGLIDGGRRHPQRVGVVGWVPGGPSGRRAAAAPCAREDHPRRRALLGQRSCSGVALLLHGDGALAQRPVPHSSGRI

SEQ ID NO: 86617 - protein, 152 aa, Zea mays
  Coding DNA Sequence Number=SeqID_43242
  Gene Ontology: Mol. function=binding; Cellular component =mitochondrial inner membrane; Biological process=protein amino acid phosphorylation
  Homolog annotation: Hit_ID=A7QPF6; Match level="QueryCoverage=92%, HitCoverage=31%, E-value=1e-16, Identity=33%"; Hit description =Chromosome chr18 scaffold_137, whole genome shotgun sequence
  Pfam annotation: Domain name=PPR; Domain location=118-151; Score =19.6; E_value=0.012; Accession=PF01535.11; Description=PPR repeat
  Pfam annotation: Domain name=PPR; Domain location=7-41; Score=31.4; E_ value=3.3e-06; Accession=PF01535.11; Description=PPR repeat
  Pfam module annotation: Pfam domain module=PPR::PPR; Domain location =118-151::7-41
MPRRDGGSWNAIISASSRAGHPAEAFSLFADMNSLGIRPKDFTLASVLACCAAECLDLRGAQAAQQLHGHIVTKALQPGPKEGCGDVHFGCVRVELAVCGRIADAKLVFDGMEQHNLVSWNAMLTGYVKPMDLAGALDLFQQMRQRRRRSLM

SEQ ID NO: 86618 - protein, 313 aa, Zea mays
  Coding DNA Sequence Number=SeqID_43243
  Subcellular localization annotation: CTP_CleavageSite=71; ConfidenceScore=5.31e-01
SFRPIVGGTQLRGSWYLSAIVWLQGFSSASPAVPPRRRSPKTVTTSPWVGRSKPGCDLGPTLSFKDVHHPRWGGGRAEPELYLLRGFVGHPLLRRSRERALTGPAGGSDFDNAGLVDSGRRQPQRVELDSLAPGDPSCRRAAAAPCAREDRPRCRTPLGRRSCSGVVLPLHRWRRLEKSPLPTGSPPPSALRASGSCTCPRPSSVGVGEGKIAAAPALRPTLLQSGAELAQKGNLVGQSLAGSSVSGTDAGVDQPRPRVGLTSLEDGWPRPRDPRTVSPSEARSDLAEGVADAEGAAAPFQRQDPSLQDRIVL

SEQ ID NO: 86619 - protein, 167 aa, Zea mays
  Coding DNA Sequence Number=SeqID_43244
QSNLLEAGEHGGAVPRERDGVWKAPEVEVEGAEGGKVEDVYEEARLTEVDGRHSGHIIHVMSAVETESPNGDNGDASTHHGSASCDILRSAHSHRSLPRPRMDICRALAPRARARPRRSRPHHLPMMTRAQPGLGCSTVNAPPSSDPSEDGEKGVDEGLMIPILIPE

SEQ ID NO: 86620 - protein, 36 aa, Zea mays; identical to SEQ ID NO: 77341
  Coding DNA Sequence Number=SeqID_43245

SEQ ID NO: 86621 - protein, 217 aa, Zea mays
  Coding DNA Sequence Number=SeqID_43246
  Gene Ontology: Mol. function=histone-lysine N-methyltransferase activity; Cellular component=nucleus; Biological process =multicellular organismal development
  Homolog annotation: Hit_ID=Q10N09; Match level="QueryCoverage=76%, HitCoverage=82%, E-value=8e-38, Identity=50%"; Hit description=LOB domain protein 1, putative, expressed
  Pfam annotation: Domain name=DUF260; Domain location=64-160; Score =131.3; E_value=2.7e-36; Accession=PF03195.5; Description=Protein of unknown function DUF260
  Subcellular localization annotation: CTP_CleavageSite=52; ConfidenceScore=5.69e-01
MDDYGNAIVVTGTAAPLKYNCRSVSPPSSVSSSCSPPPPPPPPTPPAAVQVVVGNVAPTVVLSPCAACKILRRRCADGCVLAPYFPPTEPAKFTTAHRVFGASNIIKLLQDLPESSRADAVSSMVYEAEARLRGPGVRARPASARRRSTPTKIALFCVEMANRRGNRQQQQQPSPPTTTVDGGGGSEFGGAAYGQTFYDSDDLDSATWPDHEAQLWT

SEQ ID NO: 86622 - protein, 149 aa, Zea mays
  Coding DNA Sequence Number=SeqID_43247
  Gene Ontology: Mol. function=peroxidase activity; Cellular component =cytoplasm; Biological process=response to oxidative stress
  Homolog annotation: Hit_ID=O23983; Match level="QueryCoverage=87%, HitCoverage=52%, E-value=4e-67, Identity=92%"; Hit description =Ascorbate peroxidase
  Pfam annotation: Domain name=peroxidase; Domain location=1-126; Score= -12.6; E_value=4.5e-06; Accession=PF00141.14; Description=Peroxidase
MTEKGRPLQCIYIFPCLFQDKPQPPPEGRLPDATKGSDHLRQVFGKQMGLSDQDIVALSGGHTLGRCHKERSGFEGAWTTNPLVFDNSYFKELLSGDKEGLLQLPSDKALLSDPVFRPLVEKYAADEKAFFDDYKEAHLKLSELGYADA

SEQ ID NO: 86623 - protein, 153 aa, Zea mays
  Coding DNA Sequence Number=SeqID_43248
  Subcellular localization annotation: CTP_CleavageSite=51; ConfidenceScore=5.29e-01
DGLGVARTGQPGQRRQGGLAKHKECAAARPRRGRGGPAMAQGSPASCGLPRRMSTWSRRPWLLGARGQAPDGTAQRGRRLLFARAGTQPQHHGTGMGPTVCVVGTATERGRRGHKQHYTYIISATTENSVYIRVKGCVLKRVSLGNYLSHSLN

SEQ ID NO: 86624 - protein, 155 aa, Zea mays
  Coding DNA Sequence Number=SeqID_43249
  Gene Ontology: Mol. function=DNA (cytosine-5-)-methyltransferase activity; Cellular component=chromatin; Biological process =regulation of transcription, DNA-dependent
  Homolog annotation: Hit_ID=Q9ARI6; Match level="QueryCoverage=38%, HitCoverage=8%, E-value=1e-10, Identity=53%"; Hit description=DNA (cytosine-5)-methyltransferase 2
MAPSSPSPTAPTRVSGRKCAAKAEEIHQNQEEEVVVASSAKRSRKAKLGRKKKGDAEMKEPVEDDVCAKESDEEELAMGEEEAEEQAMQEKQKEEEKKRGEKDLAVYSQDPAQSGTPDCPGERLQVVEIPRKREKIKVKKNTVVFKLIIGSLERS

SEQ ID NO: 86625 - protein, 227 aa, Zea mays
  Coding DNA Sequence Number=SeqID_43250
MGPVRSRRVWIRNFAVTRDSARVPAGKCAALSAIGEDGGERTRARMVGAAVERRAAQRPYVRLRPLAHITGSGPRGSIESPPGREAENPGTLLRVTRTPDREVRDPCRGNDVTPAEVLDSARRSSSYMQGSGTFPWGSGPITDTLECIIFFGHVVAPEPSTRWGRVLFIARLEIDARASRLHTIVRVTANPPSVIPPATSVPVAGGHVAPTPGGFVGPRAGRLVAAA

SEQ ID NO: 86626 - protein, 202 aa, Zea mays
  Coding DNA Sequence Number=SeqID_43251
  Homolog annotation: Hit_ID=O40947; Match level="QueryCoverage=63%, HitCoverage=15%, E-value=1e-09, Identity=24%"; Hit description=ORF 73
MSSNIPSATTEDEGGAPSAILPPILEESELEERTKVASCQFASERSELEQEREDLKEDLGKVFDREREVTREEKRLAKKKEHLDLREAVTTEFHDKLKTYNVMLEKQQDEQTATEAALQKLQRELDDRARNISLAEENLKAMDASLEERAMNLVRQEKDLAWREEMRERWETLLAEHELEVEEKEKKLEEKERTLEERVRRF

SEQ ID NO: 86627 - protein, 153 aa, Zea mays
  Coding DNA Sequence Number=SeqID_43252
  Subcellular localization annotation: CTP_CleavageSite=84; ConfidenceScore=5.15e-01
MGGGAGVARGAGSCSVPGLRTRVASEPLAAPASATAAGRGSSAGAIAGAGHGLTSNFSAFCPSLPHKFWHGRGPPGSGIHPEVSVAAVWPPEQKSSSSPLLEQDPLSEVVKKHERNSAKKRSFFEEKFDAERVSPLLAPEGGSGFAEARPTLP

SEQ ID NO: 86628 - protein, 99 aa, Zea mays
  Coding DNA Sequence Number=SeqID_43253
MERRSDGGHFGSAGGARQDKGLLLSEAKASGEPEMCPPLKGGPRAGRKSLELYADGGYQLRIRRLEDDDEDGYDHAYGNGKQGVEADLQEFQDVDEFED

SEQ ID NO: 86629 - protein, 138 aa, Zea mays
  Coding DNA Sequence Number=SeqID_43254
  Subcellular localization annotation: CTP_CleavageSite=94; ConfidenceScore=5.71e-01
MERSTIFPLPDARNPPMSCVWSSAVPSFVPPSTVAVNARPGARSPAKLAPARRPIAACSSPLRGGMRLASARRPASVACSRLAWPSPARRFPARCGSLQRGKVGLAVGPHQAIDILGRVFPWRFRSYARSSPSEEDEE

SEQ ID NO: 86630 - protein, 149 aa, Zea mays
  Coding DNA Sequence Number=SeqID_43255
MEENARIIWAGDGRLRARRALRARRVGLHEARESAVVAGYATTAGWRRRLQAMRRMAAVVGGGLNDGRRGKKQDVAAVGAGATSEGRQEARGLAHVVVEGLVLVQRVGGDRRSANPEVHERVVVGLAVEVLWLQYDIVAIKDEGLEGRW

SEQ ID NO: 86631 - protein, 352 aa, Zea mays
  Coding DNA Sequence Number=SeqID_43256
  Gene Ontology: Mol. function=sugar:hydrogen symporter activity; Cellular component=membrane; Biological process=carbohydrate transport
  Homolog annotation: Hit_ID=A2XFD3; Match level="QueryCoverage=94%, HitCoverage=93%, E-value=1e-155, Identity=87%"; Hit description =Putative uncharacterized protein
  Pfam annotation: Domain name=DUF6; Domain location=209-344; Score =9.7; E_value=0.019; Accession=PF00892.11; Description=Integral membrane protein DUF6
  Pfam annotation: Domain name=DUF6; Domain location=30-163; Score=4.9; E_value=0.036; Accession=PF00892.11; Description=Integral membrane protein DUF6
  Pfam annotation: Domain name=TPT; Domain location=200-344; Score =168.1; E_value=2.4e-47; Accession=PF03151.7; Description=Triose -phosphate Transporter family
  Pfam annotation: Domain name=UAA; Domain location=22-350; Score= -39.2; E_value=1.9e-08; Accession=PF08449.2; Description=UAA transporter family
  Pfam module annotation: Pfam domain module=DUF6::DUF6::TPT::UAA; Domain location=209-344::30-163::200-344::22-350
  Subcellular localization annotation: CTP_CleavageSite=30; ConfidenceScore=5.09e-01
MAAKGGATPSPGGTGPAAGNGRLFTVGLVTAWYSSNIGVLLLNKYLLSNYGFKYPIFLTMCHMSACALLSYAAIAWLRVVPMQLVRSRVQLAKIAALSLVFCGSVVSGNVSLRYLPVSFNQAVGATTPFFTAVFAYIMTVKRESWITYLTLVPVVTGVIIASGHYIVHKKHTPRDIPLYVPCDLIHHQGKKGEPSFHLFGFIMCIGATAARALKTVLQGILLSSDGEKLNSMNLLLYMAPIAVIFLLPATIFMEDNVVGITIQLAKKDFTIVWLLLFNSCLSYFVNLTNFLVTKHTSALTLQVLGNAKGAVAVVISIMIFRNPVSITGMLGYTLTVFGVILYSESKKRSNKP

SEQ ID NO: 86632 - protein, 216 aa, Zea mays
  Coding DNA Sequence Number=SeqID_43257
  Gene Ontology: Mol. function=translation initiation factor activity; Cellular component=eukaryotic translation initiation factor 2B complex; Biological process=biosynthetic process
  Homolog annotation: Hit_ID=Q5Z6D2; Match level="QueryCoverage=90%, HitCoverage=42%, E-value=2e-77, Identity=80%"; Hit description =Putative eukaryotic translation initiation factor 2B, subunit 3
  Pfam annotation: Domain name=NTP_transferase; Domain location=4-213; Score=-64.0; E_value=0.0014; Accession=PF00483.14; Description =Nucleotidyl transferase
MDFQVVVLAGGTSEKLSPLVSKVDVPKALLPVANRPVLSYALDLLEASDLKDLIVVVEGQEAAQLVDAWVSSAYLDRLRVEVVVVSEDLGSAGALRAISKRLMANDILVVSGDLVTDVLPGAVAATHRRNGAAVTALLCSVPVSGPSDTSSSSGKDKAKKPNRLNIVGLDRSKQFLLHIVSGTDVEKDIQVHKRKNTGCWSGKAPIPMIEVSYICF

SEQ ID NO: 86633 - protein, 212 aa, Zea mays
  Coding DNA Sequence Number=SeqID_43258
MPGKANCCCPARMQHFVLLLAFVAEDESEDLPVRFGAARARRCGVGGGVDATIGADVVVAGESFPTVEAVSAAYGPTSGSLALMSEVAGESPGACRLAGYPVWRIPRPLFDEPKPEAAVSARTEAELARKEDFVSRSLAGPSTGGTDAGVELPRPRAGLMSSGDSWLRLWGVRPSLFARAGFLEKTLAAMARARRCCRPSEWRSSDRVAVRG

SEQ ID NO: 86634 - protein, 105 aa, Zea mays
  Coding DNA Sequence Number=SeqID_43259
MGDGMPSSPLSSLPFSSSLLLEQSTKGLGKHKCIFKKLGLGSIDLRDQGRPPLCPTLKTNTTSEAMEMPSASLDTTVNGRYHNLGGHNVDGEEGTTKIEEGREAV

SEQ ID NO: 86635 - protein, 418 aa, Zea mays
  Coding DNA Sequence Number=SeqID_43260
MALDRSITLLFDDVVVFLLDVAYNTKKGDDDIESSKPKGGGSFMPRHLRPGDTFIAFAGHRIGYKEPYSSAMLCKSYLSLSFLSYVVDTVPSISMGVGLPNQRPRNLAPASTPRAARKPDPVRPRAAEPGRCDRATRPRPFVFVVNGASMSTVSPSSITSLSSWPPPAINGHRPHPSPRRLSLSLPLSIKARPHHGALPPSRALSLSPTVELALFSRPSSWPRPCHRSSPTPPRQNSCSPAGTVCAHPGHLDRAPFRSSASVTDHQHRCAERSSLLYALVGSRPSRPWPSLPAPELARATPGDRAHTIRQSSTIRGASPSRPTVQTHRRSYAVRHRRDRAAHQLDRPHAVHRPWNSPEFVYAVAVHPAVRGTSPEFHPRNTTTAPVPLPSNPLSRSCSSTHMSPCRRTPCPAPARRRT

SEQ ID NO: 86636 - protein, 73 aa, Zea mays
  Coding DNA Sequence Number=SeqID_43261
MEAVDPHTYRSDGANDANDVGLGVPEAGVSQSSTSTDARAVVCRGAGGQGSGEAATMRRMSCCGSWRGQVQFP

SEQ ID NO: 86637 - protein, 233 aa, Zea mays
  Coding DNA Sequence Number=SeqID_43262
  Subcellular localization annotation: CTP_CleavageSite=47; ConfidenceScore=5.34e-01
MKMLCHNITVVAQSHRGLAHSSGSPPPSPSTSDCPDNMARPRVLPVVVSPIVAKVKLHRVHIDGGASLNILTTYAFDELQILYDRLTLGGSFSTISPGCVYLLGQGCSATPLDTACVENNSNSSGEDDEDIPPIQTMYGPITRARAQQLNFHVRSNLVNCVLELTHGAMDVLMIRNLGDDQKGLGKEQDVKEEKLGRSQQEKVRSDSTSSPPQTLGLVCTKMDAQDAYKLRLG

SEQ ID NO: 86638 - protein, 253 aa, Zea mays
  Coding DNA Sequence Number=SeqID_43263
  Homolog annotation: Hit_ID=A2XJG6; Match level="QueryCoverage=51%, HitCoverage=55%, E-value=7e-68, Identity=96%"; Hit description =Putative uncharacterized protein
  Pfam annotation: Domain name=DUF260; Domain location=2-107; Score =101.0; E_value=3.6e-27; Accession=PF03195.5; Description=Protein of unknown function DUF260
MSCNGCRVLRKGCSDACVLRPSIDWIHGAQPQANATVFVAKFFGRAGLVASLAAVPLHHRPALFRSLLYEACGRTINPVSGAIGLMWTGNWDLCQAAADAVLRGESLRALSAVPAAFTDRDMDGLYGSVGGLVAAAAAAASPENSSSSAPSTTKRRNANGGSSNNAVPAAAASHHRPPPPAAAAAGLLLQSSCHQLDLCLTPALSPPGARAAGLRRRRVRRVLGQRPRARTRPVITDTESPGLPAAAKPLQLN

SEQ ID NO: 86639 - protein, 88 aa, Zea mays
  Coding DNA Sequence Number=SeqID_43264
MAAAEVCMQQQLRNRWIDVCEGQQDRILRALIPSPGVLLDLPRHEGRKGNTRTQLQRIRACQCGRFGGALGRGRTGGCEWIGTKAEEE

SEQ ID NO: 86640 - protein, 32 aa, Zea mays
  Coding DNA Sequence Number=SeqID_43265
  Homolog annotation: Hit_ID=Q8S456; Match level="QueryCoverage=100%, HitCoverage=3%, E-value=3e-07, Identity=71%"; Hit description =Putative uncharacterized protein 163K15.6
MQPGSNDCGFFVTSFIRCYDFDDGDVSEIVVP

SEQ ID NO: 86641 - protein, 529 aa, Zea mays
  Coding DNA Sequence Number=SeqID_43266
  Homolog annotation: Hit_ID=Q6JAD6; Match level="QueryCoverage=99%, HitCoverage=96%, E-value=1e-106, Identity=52%"; Hit description =Putative uncharacterized protein
MPRTKNVSAPGGGDDEDPRCPFRQVKGKTVYLDQQEGRKKRPCYSGTELRCLHRLLCEFTGFWTFLHFCLPLAYSEVHLSYMPSLLTLLTTSGRYVEEWVRVFYATVWIDPDHHWMRFRFEREDVTIHASQIRQLFEFHESSTRLHSLCYGTSDPPRRPHGGVAPSTAHVAALFRPPFLRWVATLSDRLHHNKKKFLYQLMRQTLLLRMGYREATTHILLWLLGALVSHSEFDVVDFLICEIEDTVLNGLRARRQLPYAHYLCHIFAQLIRRPQFQGTLEASRLVFGSYRPAPEDPVPAPAPDAAVDDDDDDDDDFGIPPPPPMPPRSHDHEAGSSRATPAAPPAIDPALASILQTLTQQQAHLAAEQTRQAVAHQQLSERMLSMFQTIQDRQDSLQQQLLQDRAESRAFMTLMLQHSGISIPPVQSVPPPPLHAPVVPAIQPGPPLSSVGPSSSPLRPVTLAFTSPVFSPICPQPPVPPSSAIPTTAVAVSVTTLDPAAPAAQPQSESVPAPTSIADPRSETDSDPQL

SEQ ID NO: 86642 - protein, 159 aa, Zea mays
  Coding DNA Sequence Number=SeqID_43267
MRATRRVRVFKEPNFYKNRGTEPNRTEEPNAQAYLRVSTSGKQKCRKVQKPVNSQSNLCRHLSSEKGLLNTGAEEVKQPGICSQRSHLSLIMLPKASRWDRWSGNGSGRRSSGSWCSGGGGWRSRGDGSRQSGWWSGSSGGSGGARPGGEAMNSVRNLI

SEQ ID NO: 86643 - protein, 372 aa, Zea mays
  Coding DNA Sequence Number=SeqID_43268
  Gene Ontology: Mol. function=nucleoside-triphosphatase activity; Cellular component=integral to membrane; Biological process=transport
  Homolog annotation: Hit_ID=A2YKC0; Match level="QueryCoverage=97%, HitCoverage=63%, E-value=1e-147, Identity=70%"; Hit description =Putative uncharacterized protein
  Pfam annotation: Domain name=ABC2_membrane; Domain location=87-299; Score=137.2; E_value=4.7e-38; Accession=PF01061.15; Description=ABC -2 type transporter
MHQPSSEVFQLFHGLCLMANLIKGHKQLDFFDSNGYPCPMRRNPSDHFLMMINKDFERSLAIRNEALFMMKQQGAAFTKKRQATFLTKCVVLTKRSVINMHRDMGYYWLRFGIYIAICVSIGTIFFNVGYGFASIQARASMLMFTSTLLTMMSIGGFPSFVEDMKVFRKEQLNGHYGATAFVIANTVSSTLYLGIISIIPGAVCYYLTGLQRRLDHFLYFAAVLWACTMLVEGLMMIVAALVPDFLLGIITGSGIQGLLMLNAGFFRLPHDLPKPLWKYPTYYISYHKYATQGLYKNEFLGLVFDDGVLGKGLTVSGDYILRTSLQVEMGYSKWVDLAILLAMVFIYRVLFLVTIKVGEAVKPMIKCMSIKV

SEQ ID NO: 86644 - protein, 105 aa, Zea mays
  Coding DNA Sequence Number=SeqID_43269
MRLMTWNDAALSSPLVGSSRNTSARRRQQLDADAHAPALPAADPLAHAAADPVPGHRGEPHLLDGAVGALPLVGRRHRVRQLQLRRVLTASVTVSVAISSVSWVT

SEQ ID NO: 86645 - protein, 420 aa, Zea mays
  Coding DNA Sequence Number=SeqID_43270
  Homolog annotation: Hit_ID=A2XFR6; Match level="QueryCoverage=43%, HitCoverage=52%, E-value=1e-32, Identity=42%"; Hit description =Putative uncharacterized protein
  Subcellular localization annotation: CTP_CleavageSite=57; ConfidenceScore=5.59e-01
MAPLMAVHGAGCRASPSPGVLPLFSLFKLVVTPVAASTSSPAPFDDPRPSLPPLGLRARAVPCHAPKPSGCPFFVPKAPRSWLPASLMVRTLQTTRVNTSYAPQPRQVPVYPVVVEEAPANLPPVRVENMINLEDSSEEQLPTPTPLAESLAFAAGSATSAPAFQAPAPGGDDPDDSGDGDDEDDDDEDDGEDGHINEEADYAQQDHFMGIGSVVEHYTSMFETGHIPNLLQAVLHELGAYARPLYETRRVSEPPRACYYITRIHVRVMDAGDRGFRTLCAHESLIPLSTYAASVSDAARRTLWSLSHTYRQQLQNTRFRHLPQRLRGESQTNIVPGEPGEDRLNTLAGVVAGLNTDLDSATLDLYSVHLELENAHARIAALEAQLQGLNPPEAQVPAVALSPPRKRLRYGEPGSVTRLL

SEQ ID NO: 86646 - protein, 163 aa, Zea mays
  Coding DNA Sequence Number=SeqID_43271
  Homolog annotation: Hit_ID=Q6QP51; Match level="QueryCoverage=29%, HitCoverage=21%, E-value=7e-15, Identity=81%"; Hit description =Putative growth-regulating factor 1
MAEGCQPLGGCAPPTAARQRQRGCSPSGGSEGGRARCMKGVRRYGYRPGDHPPFLKVALPTRVLRHCGPSLHQHAPGPYPYDTGAGSHTDRERGYFERDPSPRRKRALSPPTDQGFEGWPLGRVRQPPQSTRASGSLLIRGSKAGPSEGFNSRLRALRLCAHY

SEQ ID NO: 86647 - protein, 111 aa, Zea mays
  Coding DNA Sequence Number=SeqID_43272
  Homolog annotation: Hit_ID=Q6QP51; Match level="QueryCoverage=59%, HitCoverage=27%, E-value=6e-11, Identity=57%"; Hit description =Putative growth-regulating factor 1
MKGIKTSEESNHSSEASGATPGGCARAHPLEQSVTKKASGTTGSSASPDLGPRPQEEVSASLDPRARPPPRPQKVVSASPDPRARASTSTSEGIAFSPDPGLGLRRSLRLA

SEQ ID NO: 86648 - protein, 109 aa, Zea mays
  Coding DNA Sequence Number=SeqID_43273
  Homolog annotation: Hit_ID=O48967; Match level="QueryCoverage=97%, HitCoverage=17%, E-value=6e-19, Identity=52%"; Hit description =Putative uncharacterized protein
  Subcellular localization annotation: CTP_CleavageSite=21; ConfidenceScore=5.02e-01
MAHSGSTRPRPRSSRRQHEASASMRSPSVRAALTEDLRVELNHRRAGEDAPVSMERSNDLWAELNRRRASKDARVSLERARERRQNVEGQNLDYNFAVVQPQTPAGAWI

SEQ ID NO: 86649 - protein, 190 aa, Zea mays
  Coding DNA Sequence Number=SeqID_43274
  Subcellular localization annotation: CTP_CleavageSite=57; ConfidenceScore=5.13e-01
MAPGEAVELGEWRSNSLATNSAPRRSPRRPGRLCGSVLPRRVHSRDHNRRWEVGGPRCGRGSRLFHHEVLGQEIMVLDDVDHGIEQKNNIGVQRKLPWQRTSDDEHSVCRSTGVLPATGMDRHAAYRMAWSLPVSRVDRAHLMLRRHIACQWSGHGSLNTEAAHRLPVEWTGGAAYPQLMQRPLTPEALR

SEQ ID NO: 86650 - protein, 78 aa, Zea mays
  Coding DNA Sequence Number=SeqID_43275
MADEAIRRNEEESHLASEEARKAKEATERERHIKPYNPEADPALKGTLDVIRRANEAIDKAVNRLLNEAAERVLKEDD

SEQ ID NO: 86651 - protein, 172 aa, Zea mays
  Coding DNA Sequence Number=SeqID_43276
MASCIRVVHEGIETKIVVILFLPHCLRLIRQFIYITETIDVRFQPLAPHCPNENPDFDQSFRGASSPEKLQRNSREVRRSKLHHGEAGGRHREKVSFKLLNTNDDTVLVTFVNHSQGRKLRRPCLSHQKLLPSKISEGFDNALFFIGFLHIKLFFHDMFDVEDRPFPSPVSW

SEQ ID NO: 86652 - protein, 203 aa, Zea mays
  Coding DNA Sequence Number=SeqID_43277
  Subcellular localization annotation: CTP_CleavageSite=55; ConfidenceScore=5.25e-01
MVAPPPPPAAGKVMGQAQMLPFRHGGKTSSIPPPSGGLTAAIVVVARRRKEYHVVAAVEGHELETPKTEQHPELERLLETTHLELDRKLFVNTQQAPTWGLRTAVVMGARGVPSLPVYRGKPDGTPCGRSEPKVGRGGDSSEVEAKSAPWGQARRRPPSEVEVESEPWGRARRRPSSEVEVESEPWGRGRRSPSSEVEAGAEP

SEQ ID NO: 86653 - protein, 519 aa, Zea mays
  Coding DNA Sequence Number=SeqID_43278
  Homolog annotation: Hit_ID=Q6QP51; Match level="QueryCoverage=32%, HitCoverage=89%, E-value=1e-17, Identity=36%"; Hit description =Putative growth-regulating factor 1
MPHLLDCGTGAATRGNPAHGPTVPTKHIGHRSVSRERRHDGRYDQKWAGSNGGGRWVEAAVKSSAGSRPLLEQQGSPLPRREDDAPVSRSSNGSRNGCPANHPSRRINSAAGQATPLARTRKGDTLKGILLREGSGPRALLLIRGSKAGPSEGRLRALGLHAHYWSEVRRLAPRKGSTAASGHSGSVPTTDQGFEGWPPEGFDSRLRTRRARDDSGYIRYMAEARATLPRHHRKLRLARPRGSAPASTSEDGLCLARPQGSDSTSTSEDGLRLARPQGSDSTSTLEDGLRLAPTLGLGLSLDLGGVTASPDLWARTRPRYRGGSSAPPTATTSHAQATNTSPTATSAWPSYEKVAAWEDGLTSRLSPSLANAYTREQNFGSDDTFAILPPRSDFAVRCVCRAVRLGAWPRVPLPRVVAPLAYHEASPRRSACSLPQRHRRLSHSRQGLRATALGDFFSDDVCGLGITPVTRRGGISHRCEKLAAGYPHLVGRDSSAAVVGKLTPDRSAFIYTLPGVNSS

SEQ ID NO: 86654 - protein, 32 aa, Zea mays
  Coding DNA Sequence Number=SeqID_43279
MNARGRLGSDKRRTAGNILINGRREKLAFGTS

SEQ ID NO: 86655 - protein, 184 aa, Zea mays
  Coding DNA Sequence Number=SeqID_43280
  Gene Ontology: Mol. function=nucleoside-triphosphatase activity; Cellular component=integral to membrane; Biological process=lipid transport
  Homolog annotation: Hit_ID=Q7XI02; Match level="QueryCoverage=90%, HitCoverage=48%, E-value=9e-24, Identity=43%"; Hit description=ABC transporter family protein-like
  Subcellular localization annotation: CTP_CleavageSite=71; ConfidenceScore=5.82e-01
MAASPLPRWAPTPSPTRPLRVSSAGGQTAVSSSSWSWAFCRSFIGSAVVYPPWRRSTPPPPPPPAPAGDPAAANAAADDGRRHGRFCSHPLDCVGARDCSLPEDAGGGREVFLTWEDLSVTASSSTGGKAKPAVILDKISGYARPGEVLAVMGPSGCGKTTLLDALAVTMFHGVAKKRRKRQMI

SEQ ID NO: 86656 - protein, 84 aa, Zea mays
  Coding DNA Sequence Number=SeqID_43281
MRLHTLRGTFGLRSKLQCEEAQRIRRMAQSRSYAQGSFGVITEKGTDLKGKRLFRPRWTIIELLANVKGMGVILHGLRPVPINR

SEQ ID NO: 86657 - protein, 94 aa, Zea mays
  Coding DNA Sequence Number=SeqID_43282
KTDSSMNRVLGSYNRIDMVGLDLPKTELEPYNALKTFMPSWAVTNAITGTMPGIEIRNMTVMKLNMMTQTMTESSGIWRLKASQHPLSSHSQAA

SEQ ID NO: 86658 - protein, 67 aa, Zea mays
  Coding DNA Sequence Number=SeqID_43283
MVASVMAPIISLRDFGTSIVPRLFPEGGGDVEDDGFDYDYGGPHCNHCSGEDEVVEDFQEFQEYDEF

SEQ ID NO: 86659 - protein, 103 aa, Zea mays
  Coding DNA Sequence Number=SeqID_43284
MARGEHRAGTRTEAGLPRWPRQDVAPRDRREERDAGKGEEGKEEKNGVLTLMIAARARWSEAGELRQFGRGARQRGSGREMGERQWVVSFFLVVMAACLFVAE

SEQ ID NO: 86660 - protein, 227 aa, Zea mays
  Coding DNA Sequence Number=SeqID_43285
MDPQPGGRSFHDLDARVAEVPRSGVVAAVPRSVAVAPRSQKARDSGALVQASDGVPEAPRRAALPRPGEQAAPVDGVTSVREGERESLLVSPSSRAATLSYESPRPSFYKRKERAQGRARRRLSSEVEVESEPWGRARRRPSSEVEVESEPWGRARQSFLWRLRPDLVAVSLTLAGGTSVGAEQAALFSYQAILALNAPAIRSVDEAIWPRSLLREACPNWASGESR

SEQ ID NO: 86661 - protein, 225 aa, Zea mays
  Coding DNA Sequence Number=SeqID_43286
MTSHESSEGENTHSHTDGLAREGFPRILWEVLQGAEYTTPPQAEDTIESIALHGLTTFCGFHPLELSTHPIGLFPAEKEEDPMWKDRVEHANDVWALYLGQTAHLTVRCMNALYRLQAVQGEAMSQLMGLVESTKITLDNREDLVVDLSTELVEKNLQVEQMATQIQELEEQVGARENTIEVLEDKLLTTQQQLEEANQHLDMHHQCWGLVLKCYELRTRQHREC

SEQ ID NO: 86662 - protein, 62 aa, Zea mays
  Coding DNA Sequence Number=SeqID_43287
MAAECWGIPDRWPLLGALMEAAAVVEECTHSVHGALFPPSEIQDAHNIILGKSGVAHVKRFS

SEQ ID NO: 86663 - protein, 133 aa, Zea mays
  Coding DNA Sequence Number=SeqID_43288
MQPVDHVVESGEFKAAFRGHHISAGIMDRKLNEFLALTQGCHTVLHMRAIMLIRMRRRGTGSGGASVLSSATVSTVSANSYNELVNMAISQEDCITARQAEKKRKTPMAGPSAQPQRFRIVSDTQNRGPQQQG

SEQ ID NO: 86664 - protein, 76 aa, Zea mays
  Coding DNA Sequence Number=SeqID_43289
MVSHSGYGGYKCGHCTTAVGVSEALYAKAVSPDLLMGNRWGQLMFSGGHGCWHDLVVHLATGVDSRVGPYLGRGGA

SEQ ID NO: 86665 - protein, 84 aa, Zea mays
  Coding DNA Sequence Number=SeqID_43290
MWYEERAGEPPIESPRWALGPPVASRLTTSMGGGDDKASIVMETIPASRNTNGKLHFIPLRRKTEIIQNSYLPGAKYRHTDTHP

SEQ ID NO: 86666 - protein, 70 aa, Zea mays
  Coding DNA Sequence Number=SeqID_43291
MGEGESTLGAGKNASGKTCSPPIEEECWWGAAACYKEKYCIWGRRMVFPPHASLVVRMGHPLMAKENGGE

SEQ ID NO: 86667 - protein, 128 aa, Zea mays
  Coding DNA Sequence Number=SeqID_43292
  Subcellular localization annotation: CTP_CleavageSite=41; ConfidenceScore=5.28e-01
MAGSTVGQRTTQPAVQRPTTTVKYRFTAVDLLLQRALRNPRTRTAGHDLGHLSQVVSLRSGLTGIQYGTVQADPTKGDESAGWGPRDSVRRECADAGGENGPIQFVLAQSQKEDGQGQDGLDCIWLRN

SEQ ID NO: 86668 - protein, 107 aa, Zea mays
  Coding DNA Sequence Number=SeqID_43293
RKAKGQERGAAMLTGTGKRPLESSLEELRRLEYSEEVSSDEGDGGESKGSSGNDGDEGSGDDGGEGGGSGDDGDGKGDGKGIGIGGDDNGKGGDEGGGGDGNCGRTA

SEQ ID NO: 86669 - protein, 75 aa, Zea mays
  Coding DNA Sequence Number=SeqID_43294
MPRNMVNRCGHCTTAVGVSEALYAKAVLLRMIGCWCDLSFIPATGIDGREGYCFRRRGPGGVAWPGFAMLLGFLR

SEQ ID NO: 86670 - protein, 106 aa, Zea mays
  Coding DNA Sequence Number=SeqID_43295
EGDKGAVLGRWARAGALRRVVAAFQALQQGEEQGEEGEDLQGRHGQGRSDGVGLHQGSSASAMGEEEPSCRGALAMEKLLRGVHCREVELAPAEQERAQAGRCCAG

SEQ ID NO: 86671 - protein, 97 aa, Zea mays
  Coding DNA Sequence Number=SeqID_43296
  Homolog annotation: Hit_ID=Q8S474; Match level="QueryCoverage=74%, HitCoverage=8%, E-value=1e-07, Identity=49%"; Hit description =Putative pol protein
MIKTRKMMRIPDRHTQESTKRYNEITPVEDDWVLAMQEELNNFTRNEDFKSTNSKRAPFISQTKYIQDILTKFGMKDAKPIKTPHGNQWASRPRHGR

SEQ ID NO: 86672 - protein, 100 aa, Zea mays
  Coding DNA Sequence Number=SeqID_43297
MEEVGGGVQGLCPVAGRERRMEEKATNHIGGAREAEDRGSPEITIDKIKGLDSPGRGSGKRKTRVMAELTSMKEVLRGALGIRDVRTVGKLGHHVRSRVP

SEQ ID NO: 86673 - protein, 77 aa, Zea mays
  Coding DNA Sequence Number=SeqID_43298
MHPLRAPDQVCPSRPSSERHYTRQPRCGTFGYEAGGSQSQAAQVYEPATRSRKKRAQKNGYHLVGSCRDPFSRSKWF

SEQ ID NO: 86674 - protein, 877 aa, Zea mays
  Coding DNA Sequence Number=SeqID_43299
  Gene Ontology: Mol. function=transcription regulator activity; Cellular component=nucleus; Biological process=regulation of transcription, DNA-dependent
  Homolog annotation: Hit_ID=Q339A6; Match level="QueryCoverage=99%, HitCoverage=86%, E-value=0.0, Identity=70%"; Hit description=Anther ethylene-upregulated protein ER1, putative, expressed
  Pfam annotation: Domain name=Ank; Domain location=503-535; Score=2.2; E_value=16; Accession=PF00023.21; Description=Ankyrin repeat
  Pfam annotation: Domain name=Ank; Domain location=536-568; Score =35.3; E_value=2.3e-07; Accession=PF00023.21; Description=Ankyrin repeat
  Pfam annotation: Domain name=IQ; Domain location=699-719; Score=24.7; E_value=0.00034; Accession=PF00612.18; Description=IQ calmodulin -binding motif
  Pfam annotation: Domain name=IQ; Domain location=722-742; Score=25.1; E_value=0.00026; Accession=PF00612.18; Description=IQ calmodulin -binding motif
  Pfam module annotation: Pfam domain module=Ank::Ank::IQ::IQ; Domain location=503-535::536-568::699-719::722-742
MEGGKSSRARGNNIIQEAAVGSPSQIMEVESSLSGQASEYEEAESGGAGYDSFTWMQQHENGTGPVIDSSLFSSYTPASSIGNYQGQHATQNKSFYPVNQHNGPLILNGSSDMLGTNGRANQTDLPSWNSVIELDEPGQMPHLQFPVPSDQGATTEGLGVDYLTFDEVYSDGLSLNDIGAAGTHGKSYLQFSSATGDLSATENSLPQQNDGSLEEAAIGYPFLKTQSSNLSDILKDSFKKTDSFTRWMSKELPEVEDSQIHSSSGGFWSTGEANDIIEASSHEPLDQFTVSPMLSQEQLFSIVDFAPNWTYVGSKTKILVAGNILNDSQITERCKWSCMFGEVEVPAKILADGTLICYSPQHKLGRVPFYITCSNRLACSEVREFEFRPTVSQYMDAPSPHGETNKVYFQIRLDKLLSLEPDEYQATVSNPSLEMIDLSKKISSLMASNDEWSNLLKLAVDNEPSTADHHDQFVEKLIKEKLHVWLLNKVGMGGKGPSVLDDEGQGVLHLAAALGYDWAIRPTLAAGVNINFRDVHGWTALHWAAICGRERTVVALIALGAAPGALTDPTPDFPGSTPADIASANGQKGISGFLAESSLTSHLQALNLKEANMAQISGLPGIGDVTERDSLHPPSGDSLGPVRNAAQAAARIYQVFRVQSFQRKQAAQSEDDKGGMSDERALSLLSVKPPKSGQLDPLHSAATRIQNKFRGWKGRKEFLLIRQRIVKIQAHVRGQQVRKHYRKIVWSVGIVEKVILRWRRRGAGLRGFRSTEGSVESSNGGTSSSSIQDKPSGDDYDFLQEGRKQTEERLQKALARVKSMAQYPEARDQYHRILTVVSKMQESQAMEEKMLEESAGMDFMSEFKELWDDDTPIPGYI

SEQ ID NO: 86675 - protein, 907 aa, Zea mays
  Coding DNA Sequence Number=SeqID_43300
  Gene Ontology: Mol. function=ribose-5-phosphate isomerase activity; Biological process=pentose-phosphate shunt, non-oxidative branch
  Homolog annotation: Hit_ID=Q7XBE1; Match level="QueryCoverage=10%, HitCoverage=11%, E-value=3e-26, Identity=61%"; Hit description =Putative uncharacterized protein Z013I05_4
  Pfam annotation: Domain name=Rib_5-P_isom_A; Domain location=541-699; Score=4.1; E_value=7.4e-10; Accession=PF06026.5; Description=Ribose 5- phosphate isomerase A (phosphoriboisomerase A)
MTLNVKLILDEFNRRFDEWETRWDRRFSSAAYIDQPPTPPSVNHPSSDASARAPSTRAAAVGAVVIADNWGGCFDDGERYCTAPSVIADDWGGLFDGEVANVNTEFADHWYGPSSTDPDAPHDADADSFFINTGEGPVEPVFGDTAVGALGDVGAVPDLVEEEEVPVDTPAKCLMRVLNRSDYYVSNRGDYYGPYTSSTVDAAAVLLADAAEARLDWRFAKLPQPQAEEVDEPFRDVANPPSHPSIVYESYRDAAEARLDWRFAKLLQPQAEEVDEPFRDVANPPSHPSIVYESYRDEAMAGAGARALAGRCNERPARGRNSSSDDRSEQSYLTPTCEATNRAPAPDNRLMASVDHRRRQTLDEEGGVEQESGGAIADKVEAVATHELPRDETGAEVATQQPWRLCRSTSSLVMMGSDGACMGFAATHRGELVAGGHAGGALCSGVVAVSVGHVRVHVQPCVRSADGAAHPGHPRGVGGRRHPFPLHLLLRGAVLAGRAPGDLRARRAAPTTSSIEEDVPFDTLTKCSMRVLNRGTNYGHNTAASLKTSGKRAEFIVSIVKGRGGSLFREKMIVGVGAHFIVIVDASKLVSRLGCMGANPIEVIPFDALHALGLICGLFDGLPGSHTRRRSVPAAAANGKEDSKQYIITDNDNYIVEDGIRGDLRGISDRLLQITGVIEHDMFLGYFSHAEEGGDARTKVQLTEAAERCFDELVGRGLLRLTVGSNGAAGARMPIMICSFAKDVYDHENFCTESAANNLSEVRRLSIVENEADDRIGEGMTMAAWTTSMETVVKLEQAGERLWVKMGGHKVLNVDKYDNIFAKPGGSFRGPDVHVETARRNTVTYSILEQRDAQKVQLFKSINSGAVFGFPENLEEAARASLMSGIKQPWPPPMELSDWICAGPPAT

SEQ ID NO: 86676 - protein, 177 aa, Zea mays
  Coding DNA Sequence Number=SeqID_43301
MVSIEQRGEEKWEQMMKVLDHLGKKLEGVEAGQQCLEGQAELAATVAKKAEEEHTILASQIEEPAMYMEGNVVMWLQVHKMKHGLGNWMQFSRDVNAKFGVEEYSQVGLKGEVQSPIMTHMPQSMDKAIVLAQIQQEVLEKGRVKLQKGLAANKPMGNTLKLDIRTWLNPSELIKER

SEQ ID NO: 86677 - protein, 113 aa, Zea mays
  Coding DNA Sequence Number=SeqID_43302
MQRDKYCAQSTLQITTQLLASLSLFCVRENTYDNPIKGLTSVLSVEQVLNAKLTGFNTKIIDQAKDGGKKSFEVPSAREKVKEIRNPKPGVKKKTCKVKVDRVKSYGASRITT

SEQ ID NO: 86678 - protein, 405 aa, Zea mays
  Coding DNA Sequence Number=SeqID_43303
  Homolog annotation: Hit_ID=Q7XDE1; Match level="QueryCoverage=96%, HitCoverage=95%, E-value=2e-28, Identity=30%"; Hit description =Expressed protein
MAPEPFFTPPPAPRHLAELRIDPAHHAVAFSAPCAADARRKRRCLLPASSVRKRILLELPPFDTTPNTPSTPPTPPPPPISPMVPRAAFSFEPGLRPRQPTSAGGSEASCAGNMFAFLAAPERPNTPTGPTSRGGFVFAASPEGPLTPTSRGSNTGRLTFLPSPKQPLTPMCSTASGCEASLMLTGSGAAASLHSAKTARTGSTTRGVGFEFFPPKGTACAKLGSPSSAAAKKTTLPSVGLGAPSFVFSASQTLPPRRGGSRKRPRPNLRIETTDRSMGPRLWEEDMTPLQQQLTPSPQKLAKTNSNVNPAASRSSIMSEPCCAFFASPGKAAKQEAKKAPSEASRSPAGSRCTSSKARTSSPENPRKPEQEVEVSSAICSGAELLLRVTCKCGVHKEFSFDHGV

SEQ ID NO: 86679 - protein, 114 aa, Zea mays
  Coding DNA Sequence Number=SeqID_43304
MATTEARRLAVVPQLVLRSTLRSWSIGQPGDAGVAKAETSLRVAGAGLRALGFPRNLSGLWMFVTLYWRRDSGCLLLRADAGTEASIVTQRLEANLGVKQVFGSFGALWPGVCE

SEQ ID NO: 86680 - protein, 207 aa, Zea mays
  Coding DNA Sequence Number=SeqID_43305
  Gene Ontology: Mol. function=flavin-containing monooxygenase activity; Cellular component=microsome; Biological process=electron transport
  Homolog annotation: Hit_ID=Q9SDE9; Match level="QueryCoverage=68%, HitCoverage=35%, E-value=1e-54, Identity=73%"; Hit description =Putative flavin-containing monooxygenase YUCCA3
  Pfam annotation: Domain name=Pyr_redox_2; Domain location=8-207; Score=-38.5; E_value=0.017; Accession=PF07992.5; Description =Pyridine nucleotide-disulphide oxidore
MAAVAEEEVIVVGAGQSGLAVAACLSLRGVRALVLERDDCVGSLWRKRAYDRLHLHLTKKYCALPHAPHPDEAPAYLHRDDFARYLDGYAARFAVRPRLRREVRSARYDPASARWEVEAVDLGTGQAERYAARFLVVASGENAEKFVPEVPGLEAFPEVTLGGWWKRRRARRAGLRVAMGAGAGSGCADMGRIGSERVDEERSNDED

SEQ ID NO: 86681 - protein, 452 aa, Zea mays
  Coding DNA Sequence Number=SeqID_43306
  Gene Ontology: Mol. function=hydrolase activity, hydrolyzing O -glycosyl compounds; Cellular component=chloroplast isoamylase complex; Biological process=carbohydrate metabolic process
  Homolog annotation: Hit_ID=Q41742; Match level="QueryCoverage=100%, HitCoverage=96%, E-value=1e-134, Identity=83%"; Hit description=Su1p
  Pfam annotation: Domain name=Alpha-amylase_C; Domain location=356 -428; Score=0.9; E_value=0.053; Accession=PF02806.9; Description =Alpha amylase, C-terminal all-beta do
  Pfam annotation: Domain name=Isoamylase_N; Domain location=87-182; Score=125.9; E_value=1.1e-34; Accession=PF02922.9; Description =Isoamylase N-terminal domain
  Pfam module annotation: Pfam domain module=Alpha-amylase _C::Isoamylase_N; Domain location=356-428::87-182
  Subcellular localization annotation: CTP_CleavageSite=50; ConfidenceScore=5.10e-01
MAQQLPCVSSPRPLLAVPAGRWRAGVRGRPNVAGLGRGRLSLHAAAARPVAEAVQAEEDDDDDDEEVAEERFALGGACRVLAGMPAPLGATALRGGVNFAVYSSGASAASLCLFAPGDLKADRVTEEVPLDPLLNRTGNVWHVFIHGDQLHGMLYGYRFDGVFAPERGQYYDVSNVVVDPYAKAVVSRGEYGVPAPGGSCWPQMAGMIPLPYNKYRDTVRQFIKGTDGFAGAFAECLCGSPQLYQEGEFASLSVRRLRKRQMRNFFVCLMVSQGVPMFYMGDEYGHTKGGNNNTYCHDHYVNYFRWDKKEEQSSDLYRFCRLMTKFRKECESLGLEDFPTSERLKWHGHQPGKPDWSEASRFVAFTMKDETKGEIYVAFNTSHLPVVVGLPERSGFRWEPVVDTGKEAPYDFLTDGLPDRAVTVYQFSHFLNSNLYPMLSYSSIILVLRPDV

SEQ ID NO: 86682 - protein, 330 aa, Zea mays
  Coding DNA Sequence Number=SeqID_43307
MALLDPCERFQPEVALNLARNPLGWGVLAFAGRTCAGVSPLGDLAVKDCWRGLAPSLYLWCPASSFRQPSSPTSAGCPWRRRSFPLLPLAFGGKDDHQPREGGQRVEPRLHPTHPQLFGVGSEPCCGSISLALMVLVPPPTLPPTAKRGSGFPSTARATVASCAGPPHPWCPLRRWPHCSDAAWGVVQDVIRCGGGGRVLGWSCPHPRRRTGARTSSHALRWPPSPASHRCKGGHRRWRAVGAEVAASAGEPLGVEVVAAVDQQAGLMRADLTGLAYTDAPVTRKRHSFSHNKIVTPGSLDPWGVQKGFRRKAGFGPVDRGARGPSGGSI

SEQ ID NO: 86683 - protein, 206 aa, Zea mays
  Coding DNA Sequence Number=SeqID_43308
MDNIDDVTGKRLIALKEVQKDKLAVAKAYNKKARVSWPDRLGGRAVCAGGPDGHAVCQWSGSNNWYQRQVGPVHSQTNLGSQCVRGRLLGIVPHCVVRNQRKYKRKKTWLEQPRLCAVWVHRTVRWCTGQCPVHQAGVWSTSRSQEFVGGVRLKFTGLSGGAADCTCFHFDPYCKGERLQVVEIPRKRERVKKEEHRGIQVDHWTT

SEQ ID NO: 86684 - protein, 493 aa, Zea mays
  Coding DNA Sequence Number=SeqID_43309
  Gene Ontology: Mol. function=sugar:hydrogen symporter activity; Cellular component=integral to membrane; Biological process =carbohydrate transport
  Homolog annotation: Hit_ID=Q8H6J2; Match level="QueryCoverage=99%, HitCoverage=76%, E-value=0.0, Identity=91%"; Hit description =Putative sugar transporter protein
  Pfam annotation: Domain name=Sugar_tr; Domain location=8-484; Score= -82.8; E_value=9.4e-06; Accession=PF00083.15; Description=Sugar (and other) transporter
MTSHRPAGEIAAIVEGVDIISDSTVGAARAQSFSGTSASHTWPRSTFYWQLSDPLVDLLGSVHENMSEGGSRRNSFFPVFNSFSFPEHEHMNEHRDGNSDQQTRETYYAGEANNGDGLRASLLSQAANVEVNDTNTSFTSEGSSSYLRRHGTSVLAQEFMASIHDYDIEEEEEEIHRFALPHQSAPRDMESTGRHPFRHQIVRLSETADMKFKWRVLLQPGIRHALCYGMLIQALQQVRLCVIVDYVFNSAWSSVYLRTGYHVYRMLVSLLTRSFLLVSCLLFSKIQSTGISGLLRCAPEIFEQSGVASLFSDIGLSPHSTSILMSTLNALLILPCITAAMLLMDVCGRRVLVLATTPVLILSLSVMSMSTLVNMGPFESAVLFHFALTICFWSYVIGLGPIPNILCSEIFPTKARATCASFCSLSFWFGGLLSAYCFPVMLSTIGLGGACGIYALVCCAPLFLVYYRIPETKMLNLELIAELFKLSRQEYVQ

SEQ ID NO: 86685 - protein, 166 aa, Zea mays
  Coding DNA Sequence Number=SeqID_43310
  Subcellular localization annotation: CTP_CleavageSite=34; ConfidenceScore=5.01e-01
MTRTSSTSRPIRPRLLRRRHDLQNCAPPPIQPPRFVARESVTPRRRGRAKKLEIDRCRRGSSTTTLSRGRIQAGEVRVAPWDDLFSTIARRRRKIVGNPTPGTSSCRGSAYRRGPHHYPRGKPGRGLGKLVGVSAAVAAPFGGRGMELGDAVATVRSLMNGTDQPG

SEQ ID NO: 86686 - protein, 170 aa, Zea mays
  Coding DNA Sequence Number=SeqID_43311
MAHRTVRCTPDMSGAPATSSVPLESERWSSDLWATLDVRWRTGQLLFIVRCASMGNPDVCACCGAFNVSAGPQRDDLADYWAHGPFARHLVLLVDPGDICPPQAPDLWVDFEITGPKIQDNPLEGLHFKSSQKLLLSSTCAFLEVSLALVLPYALEVHPMGVAPELRVDF

SEQ ID NO: 86687 - protein, 120 aa, Zea mays
  Coding DNA Sequence Number=SeqID_43312
MASGHCCRTTSAHLRCRDDATILDIIVVERARYNEYRSLLARLPNEVHPGLISENNPRVVDIGDDYEVPMFDDGQRGAATLDRVQAVAAPELADYFQRSNWQSPSFFSSSVSNANASASC

SEQ ID NO: 86688 - protein, 202 aa, Zea mays
  Coding DNA Sequence Number=SeqID_43313
  Homolog annotation: Hit_ID=Q5Z9G5; Match level="QueryCoverage=39%, HitCoverage=32%, E-value=8e-12, Identity=44%"; Hit description =Putative uncharacterized protein P0655A07.24
MLDNSSAYGSSDGHMNGAREQESPGRRGALQPADLAVVEGARGGASASAAVQLLEAPVGRGGVGGGGAVHGAGGHGAAGRRGRPCGGTAAAAPRAVRGGAGGLAVLRAYPFRVPARGVLPLAYVARAQGAPLGDAGIAAMEAALRDGVLPFRVDGYARTRWKVAGIVGVDQWTRLACQLRFFWPNGTVLPFRCISKSKFLFF

SEQ ID NO: 86689 - protein, 104 aa, Zea mays
  Coding DNA Sequence Number=SeqID_43314
MPPDRPPLALEEDLAEANARWTTSSTSSAHTTRTCATPSGTAETSSTPWGTADPSNLYLHPHREEDQENHDNPSSRRREEVEPSRASTVLGTCSQVLRVKNKAT

SEQ ID NO: 86690 - protein, 383 aa, Zea mays
  Coding DNA Sequence Number=SeqID_43315
  Homolog annotation: Hit_ID=A2X6T6; Match level="QueryCoverage=15%, HitCoverage=5%, E-value=6e-08, Identity=50%"; Hit description =Putative uncharacterized protein
  Subcellular localization annotation: CTP_CleavageSite=82; ConfidenceScore=5.60e-01
MPSPSPSPSAAEPFTELEPRRPRPRARAPPSPSARATSSPRPSPSAAVPFTEPERPPSPSPSSSPAVLVPEPKGRRHGPRARSAVVPKLLNFFLSYFRDEKEPLDMVESSVRVIETHVDIIRSLVTDGVVDTSEPESVYTLKTTLFQIGDVCDMLEKCALSIKKYADSKRAKIIQDEALQYAEDDEAADDLEELPSPDLLTQADILEKYFGIEYDSDQSRDRSALSNAVRQRRHGCDVIMLKDPKKRLSHVVYHLPLFVGFTDGWKHLVIANDLRAEDVCELVKGPDDADIREEKRTDEAGAALNFMTTHPDRVHRLTIVWPLNKLADVPSPKHYNITAIGKCPSICELASRPDPAPEVPKSKINAEWLERDMVSVGVAKVEL

SEQ ID NO: 86691 - protein, 110 aa, Zea mays
  Coding DNA Sequence Number=SeqID_43316
MGAHTGRVEAERRGRVKPGGREAATWGAEGGEGRRWWPEQEQPAAENLARAALAAGAARAGCAPGRGFGVGAGGAIRHRAIAAGGRSSSRVEEARAPEKGEKRAYWSGRA

SEQ ID NO: 86692 - protein, 83 aa, Zea mays
  Coding DNA Sequence Number=SeqID_43317
MVEGDSCEEAKEATIGSSTYLGDVDGVDGNGGHDDGADRHQSPLGESMAGRPRQGKGPEGGGALTISGGSGGHGEDRGGGEAR

SEQ ID NO: 86693 - protein, 503 aa, Zea mays
  Coding DNA Sequence Number=SeqID_43318
  Gene Ontology: Mol. function=transferase activity, transferring glycosyl groups; Cellular component=cytoplasm; Biological process =metabolic process
  Homolog annotation: Hit_ID=P16166; Match level="QueryCoverage=93%, HitCoverage=99%, E-value=0.0, Identity=78%"; Hit description =Anthocyanidin 3-O-glucosyltransferase
  Pfam annotation: Domain name=UDPGT; Domain location=26-472; Score =535.0; E_value=8.5e-158; Accession=PF00201.9; Description=UDP -glucoronosyl and UDP-glucosyl transferase
  Subcellular localization annotation: CTP_CleavageSite=63; ConfidenceScore=5.55e-01
MAPADGESSPPPHVAVVAFPFSSHAAVLLSIARALAAAAAPSGATLSFLSTASSLAQLRKASSASAGHGLPGNLRFVEVPDGAPAAEETVPVPRQMQLFMEAAEAGGVKAWLEAARAAAGGARVTCVVGDAFVWPAADAAASAGAPWVPVWTAASCALLAHIRTDALREDVGDQAANRVDGLLISHPGLASYRVRDLPDGVVSGDFNYVINLLVHRMGQCLPRSAAAVALNTFPGLDPPDVTAALAEILPNCVPFGPYHLLLAEDDADTAAPADPHGCLAWLGRQPARGVAYVSFGTVACPRPDELRELAAGLEDSGAPFLWSLREDSWPHLPPGFLDRAAGTGSGLVVPWAPQVAVLRHPSVGAFVTHAGWASVLEGLSSGVPMACRPFFGDQRMNARSVAHVWGFGAAFEGAMTSAGVATAVEELLRGEEGARMRARAKELQALVAEAFGPGGECRKNFDRFVEIIVPIKSTISILAQQSSPLKAYSVIFNPYKSKKIDID

SEQ ID NO: 86694 - protein, 315 aa, Zea mays
  Coding DNA Sequence Number=SeqID_43319
  Subcellular localization annotation: CTP_CleavageSite=50; ConfidenceScore=5.10e-01
MQPGCTPPPAVTQDGDLQFDGGGKQAGLRPLPLPQPQGFSSSVLGRGVCRAGVGPCVGGGPLLPSVIGGKGVRRSWRWQLPRARLSDLSGFGAAPGTAFRHGSWKSVRPEVIAAAVRPPGAEVVVAAAAGAGDGVSFVGLLSLRRPPDRVGLFVLAEESLGSVGLAVRGFSCLVKGTPWSLFDEPKPGVAASARTEAELARKEDLVGRSLAGSSVSGTDVGVDLPRPRVGLMSSGDNWPRPRGDQPSRLLEPDSWGRPWRRWPGRDDDVVLQNGDPRTASPSEARSNLAEGVVGAEGAAAPFSRQDPSLQDRIIL

SEQ ID NO: 86695 - protein, 159 aa, Zea mays
  Coding DNA Sequence Number=SeqID_43320
  Homolog annotation: Hit_ID=A2WM84; Match level="QueryCoverage=85%, HitCoverage=20%, E-value=2e-18, Identity=43%"; Hit description =Putative uncharacterized protein
  Subcellular localization annotation: CTP_CleavageSite=40; ConfidenceScore=5.20e-01
MSLPTSPTLLRSLSVCFSDLGLPALWFLNLSNKCLDGTVSSSLLRFTDTAFVGNNLARPAPAPPSLCLLTSPHLTLRGGGLGSVRQARLREAAILAVAVGGCVIGFAVAALLLLAFCNSTRERAILMMQTAAGCRKVPPELPEPAFDINFACDGIQHRG

SEQ ID NO: 86696 - protein, 71 aa, Zea mays
  Coding DNA Sequence Number=SeqID_43321
MQAALSSCQDKVSGILALNAPAIRSVGVAIWPRLLLGEDWASGEPKLCADGGYQLRLGVLGVPLIMVPDNF

SEQ ID NO: 86697 - protein, 389 aa, Zea mays
  Coding DNA Sequence Number=SeqID_43322
  Gene Ontology: Mol. function=oxidoreductase activity; Cellular component=integral to membrane; Biological process=electron transport
  Homolog annotation: Hit_ID=Q94EV6; Match level="QueryCoverage=92%, HitCoverage=67%, E-value=0.0, Identity=99%"; Hit description =Cytochrome P450
  Pfam annotation: Domain name=p450; Domain location=44-389; Score= -66.5; E_value=9.6e-10; Accession=PF00067.13; Description=Cytochrome P450
MGTGGVALVAAALAVVLVTRLWTALAHLVWRPYAVARAFARQGIRGPPYRVLVGNGKEVQAMRAATSGDTLDLASHDYIARVMPQYRAWVSLYGKVFLTWSGSTPALFVGSHDMVKRVLFDKAGLYGKTDPGPTILSLMGRGLVFTDGDDWSRHRRVVHPAFAMDKLKSMTGAMAACAAEVIRGWEARAAASGDRGEVTVEVGQQFTELTADVISHTAFGSSYRQGKEVFLAQRELQFIAFASINSGMRVPGTQYAPTKANVRRWQLERTVRGTLMAIIDERLAAAKEAKGYGSDLLGLMLEANAGDGGGKRQQQAMSMDEIIDECKTFFFAGHDTTSHLLTWAMFLLGTHPEWQQRLREEVVRECGGAEVPLSGDALNKLKLVSPLPP

SEQ ID NO: 86698 - protein, 153 aa, Zea mays
  Coding DNA Sequence Number=SeqID_43323
MGKSKKGSGSSPRSGDKRKRDLTPPSEDFGDSEYSEEEFSSESKGSPAPVSPPSSDDSDDSQGIVTEVWTYIRAVERSGLEGSDESEYSSDEEDSSDEEDSSDSSEEDNGGDGGDGGDDGGNGDDGSDRGRGGDGGSKGDHGSGSKGSNKTSG

SEQ ID NO: 86699 - protein, 160 aa, Zea mays
  Coding DNA Sequence Number=SeqID_43324
MYSKSPWGGASGAGDLDLSGTLSSTSPIGVAFEDSKTASKTLAILLFLGVAVVGLDSFDSPVTAGGLSTFGYSTGFSDSGSFVGPVLASIDIAGAVSVAEGTPSAFSISFNTSVVPIGFGLRVKTLALFGFGVLEEVEATTFLSPLAFGQENSNEGKQIQ

SEQ ID NO: 86700 - protein, 293 aa, Zea mays
  Coding DNA Sequence Number=SeqID_43325
MSGDECGPRTVAEEGVGVGAEGAATEDADGVGAGVRRRGAEDGRVQGRGSIGRHSASGAAALGWGAAALAGTQRRAWRCGGRGAAAWARGRDRRGHEHDGVGRGGVDRAAAARSDESERGSDSGSAPEDSELHSARPRARTRAQPRKMANSAPPDPGLGLVLSPGRRRTPLRPTKGSDSGSAPEDDELRSARPQGSDSGLAPEDDELRFARPQGSDSALASADGLRLARPRGSDSTSTSEDRLDLDLGEASTSPNLGHGPTTSTGGAIITLPQADSGYGEQDRRPIWLAPPDK

SEQ ID NO: 86701 - protein, 331 aa, Zea mays
  Coding DNA Sequence Number=SeqID_43326
  Gene Ontology: Mol. function=oxidoreductase activity; Cellular component=proteasome core complex; Biological process=ubiquitin -dependent protein catabolic process
  Homolog annotation: Hit_ID=Q7FS90; Match level="QueryCoverage=94%, HitCoverage=53%, E-value=1e-174, Identity=99%"; Hit description =Putative aldose reductase-related protein
MTSVSRLFPITDRLGLLATGIAGEGRSLAHEARNQTAEFRFNWGYEMPPDVLAQWPKNLRKILGGGMRQVGVLCAGAHTLWESLLGATIVDMAVIVTPANDYELPASVLAALEPKDTKPYALQKAEDIVGTMLAKGFILGRDALDKAKALDEKHQLTSTATARVSSFDKRIGLSEKISVGTSVVNDKVKEMDQKYQVSEKTKSALAAAEQSVLTVGSAIMKNMYVLTGAAWVTGAFSKVTSAANDVGAKAKEKIAVEQEDKNAEGGPGQANISEIPAAHRELDCEFANIHVSETSEDVPMSSVTVPLLQMRSPAWPLHQLKFLKNQKLHRD

SEQ ID NO: 86702 - protein, 91 aa, Zea mays
  Coding DNA Sequence Number=SeqID_43327
  Subcellular localization annotation: CTP_CleavageSite=44; ConfidenceScore=5.37e-01
MGEGLMAAASALRSSLLLFGPSEQKSLSSLLLERATTSRSSVFCCSAGPPTVWDSPVGYLNRFTKRESPRAKVTSEEASKHIYTSDDSRSA

SEQ ID NO: 86703 - protein, 249 aa, Zea mays
  Coding DNA Sequence Number=SeqID_43328
MEARVHASCNRRAGCYVQATAPPLAPLPRLLDCGTSTATRGNPAYDPAVPAWRDGQYGPKWAGSNGNGRRAGAAVTSRSKRRFAFAIMTASKKGLGKGDTPKRILLREGNRPQASLLIRGSKACPSEGFNSRLRALGFCAHYWSEVRRPAPRKGSTAASGHSGSAPTTDQGVRLTAAKSGPRRHGKLRFARPQGSDSGSALEDDELRFARPHGSDSGSAPEDDELRFARPQGSDSGSAPEDDELRFARP

SEQ ID NO: 86704 - protein, 95 aa, Zea mays
  Coding DNA Sequence Number=SeqID_43329
MGSSSLRAERESRLVGGDETDGFGYDYGAGKWYSFRLERVVSIATTAQAKMKLWKETFRSSKTTMSSRRGLAATPSRLPVKAAVIYVSFSHFDVL

SEQ ID NO: 86705 - protein, 137 aa, Zea mays
  Coding DNA Sequence Number=SeqID_43330
  Subcellular localization annotation: CTP_CleavageSite=23; ConfidenceScore=5.42e-01
MAGSARPARPRPGRLGQPPAVPPAGAPPGRPAVRPPGPLAAWPPWPARPLAALAARSPGRLAGSAAWPARPPRALAWPPVQPGRLSRPAAQLAAQPAGSTAPRAGGYEIDGFGYDYGAGEDEAVEGDFQEFQDYDEF

SEQ ID NO: 86706 - protein, 63 aa, Zea mays
  Coding DNA Sequence Number=SeqID_43331
MDESEKGDRPPGTSNCITFESQRIRDASDSKADRAEGLLRLRDTDTSLVTFARGDSRLVKRFR

SEQ ID NO: 86707 - protein, 287 aa, Zea mays
  Coding DNA Sequence Number=SeqID_43332
MEVRCQTSFCQNEDGFPKLLRACIVHLRIRSQPEYDGREFVENGTEKCVVTIYIGSSPHHVEWSVTAAGHRFKDTSQVIARKALRALCQIYEEEVADTPLRFLPPFQRDRPVWMARMRALEGQQLLEDDPTVVYLTAYLLTLDAQYDFLARHHPQAHAIALKSREVIAVEALKQAKDEHVQKLEAYLVTHNQHRALRIQEPASSNQVQPMRAEDPQILEGHPVSIRGEKKAWELPKGAIVLEGIPVFPQAMDKQEHSESSQDPPPELFDPLTEREMCPWAISKYFGD

SEQ ID NO: 86708 - protein, 211 aa, Zea mays
  Coding DNA Sequence Number=SeqID_43333
MVEYNSPNSQAPLNLSCVTIELVTENKKLTAPTEALLQRLAGSSRSHWRSDSHLQRRRVRVLLCATIPNTWSSNAHLPPLPLPPLRSRSHLSPLQEPYLDIYDGRVESESWSSFDICDDSGESESGSSFDICDDGGSHLSGMRDAEEEEEKGEPEDVMGGGSREGRRGWGGGRLGTGECKGRATLPRGKGRGGRDEAQAQRTTNGNFGSEL

SEQ ID NO: 86709 - protein, 279 aa, Zea mays
  Coding DNA Sequence Number=SeqID_43334
MQIEDNINVGLMLHLDRTILDPAFEDFLARKRSSSWADLFPDNDGSVSVPKIWAAFFMGLLMRPDSFDWARKFLLSRAISAFVAPSMDTISIRIPPPPSQDSPAKPQLSPQSEATPRKRQPISVDTTVRRSARLRAKAKGFKNCTGIGKKNCSCCTQYTPPSMHLDVIKKLGAEFCKMTPSKLSPEDLNRSKATGTAIQRPVASTDSKDEESDFSDEQVGDPYFNNDNDDEANTSAGLLCGPFNSTAYGFILEEGSIGVCYAYQNSLILRLIVYHDVWL

SEQ ID NO: 86710 - protein, 73 aa, Zea mays
  Coding DNA Sequence Number=SeqID_43335
  Subcellular localization annotation: CTP_CleavageSite=29; ConfidenceScore=5.17e-01
MVTSSSTVGKAGQAAASTPPSASRIFVIQAKMEDEASRGPPPRGSAALFFPPRPGVKGVLEPHGDFLQPCRDR

SEQ ID NO: 86711 - protein, 89 aa, Zea mays
  Coding DNA Sequence Number=SeqID_43336
MALHKLYDDGGPQLSYGSRTTSAGTRPLQQLSLRQAPPHLQQPRHHASRNKAPTVQHCKNEFARELHLVMLRAKGRFDSTIPAWLQLWQ

SEQ ID NO: 86712 - protein, 250 aa, Zea mays
  Coding DNA Sequence Number=SeqID_43337
  Subcellular localization annotation: CTP_CleavageSite=41; ConfidenceScore=5.14e-01
MALPVDVAVCALGRATWGAESEPWGRAKRSFVVFRVLARVRALGSGGAEFAVFRVLARVRALGSGGAEFAVFRVLARVRALGSGGAEFTVFQVLARVRALGSGGAEFAVFRVLARVRALGSGGAEFAVFRVLARVRALGSGGAEFAVFRVLARVRALGSGGAKFAVAPLSRPDCRSDSPCRVALQSEWRRRRCPSVRLQLARRLLDAWAWVPKLTRQKLEKRVHLARLHAACMAVRPFCPLVWARMGGRL

SEQ ID NO: 86713 - protein, 152 aa, Zea mays
  Coding DNA Sequence Number=SeqID_43338
MGKNNKCKREPTPPSEDFGDSEYSEEEFSSESEGSPAPIPLRESSDDSDDSQGLAAEVWTYIRVVERSGLEGSDESEYSSDEEDSDGGGEDEDGDNDDDDDEGGGGDDGDGSGRGGSKDGDGGGSRGGSDGGGRSRGSSMGGSGGGSNRASG

SEQ ID NO: 86714 - protein, 370 aa, Zea mays
  Coding DNA Sequence Number=SeqID_43339
  Gene Ontology: Mol. function=metal ion binding; Cellular component =nucleus; Biological process=chromatin modification
  Homolog annotation: Hit_ID=Q8SA95; Match level="QueryCoverage=100%, HitCoverage=100%, E-value=0.0, Identity=81%"; Hit description =Putative SET-domain transcriptional regulator
  Pfam annotation: Domain name=zf-MYND; Domain location=60-115; Score =18.4; E_value=0.00032; Accession=PF01753.9; Description=MYND finger
MASWLEQLQRELAARGLTVASIPGKGRGLIATCTFFPGDVILNQEPYASTPNKILVGSSCDHCFTSGNLRKCSMCRVTWYCSSNCQVLAKPTLYSTYISIDCAIKEEWKLHQLECRAMAALTEDRKKMLTPTIRLMVRLALKRKLQNEKMANLVSLILPFIELDLKEIAQTFSKFACNAHTICDPELRPLGTGLYPVISIINHRSCVPNAVLIFDGRTAYVRALQPINKDEEVSISYIETATVTKKRNNDLKQYFFTCTCPRCVKGFDEDALLEGFRCKNQACDGFLLPNSGKAWRLKIPFPRPRTVREAYGTGLLEFTEDALKSLTRAADILKVTHGVKSQFMKELFGKLEEARAEVSFRLSSRHGHDE

SEQ ID NO: 86715 - protein, 257 aa, Zea mays
  Coding DNA Sequence Number=SeqID_43340
MRPRFCAHTRSAAQGAIITAAGGPPTSLMSVYYILLNSAKRPRPGGPNISIPAAALPAACLASEATGDDTHGSQVAAAVDRPTDRLSKPETGQARQLRAHGEGGRLATGSSPVQETKPFHIGVHAADPLLERPASIRLRTQASRPAAFSLSGCLASQSHLPCPSPLPCACSAELALFGFADVGSCYMIIDSKKFVNGPWALFAEHYSTQAPAETYAAAIQTAATVSACSQPNTPNDFGPGLEQTIPNVASSRPSRDV

SEQ ID NO: 86716 - protein, 122 aa, Zea mays
  Coding DNA Sequence Number=SeqID_43341
MCMDLGCIQRTWLLTYGPGYHRAATKQTEYAGSQRQPSRLQKLLAKACGGFANPAVSIGRDLALWVLVVIRVVELPDQSSMLTCSLYTGYVVQPWKDQKDDALQAESHSSPYSVVGTMRIRA

SEQ ID NO: 86717 - protein, 525 aa, Zea mays
  Coding DNA Sequence Number=SeqID_43342
  Homolog annotation: Hit_ID=Q8SA89; Match level="QueryCoverage=100%, HitCoverage=100%, E-value=0.0, Identity=86%"; Hit description =Putative uncharacterized protein Z195D10.15
MTEQETPKHYYLLTCKKAEGKQSMVDANSSETLAPESGLTTSQSQDHTTSIPRPRALPNCGLLLAVQQCVCSACYSDLRGQARLPLHTFLKAAKMSVAVYRGPAAVPAFEAPCWLRPAEPYKQPEAVVDDRPAQVDIWNAIQADVDRASAGAKKASKPYVHRSRSLMSQKSLEVCTESLGNETGSGDFTSSLDMAFLFDSPLPAGAAAEEESFWQHDGSRRCEEEQWESEDLAAVNYHCSAGTRPLNRRSFPPPLPSMSRRDGPCLQMRPRRQDGRLVVEAVAVRPRGYLHAKRQGGRLRLSFVECSARAQSAASRITAAAAEAPYFPAVEPKNAQEEEAAVEVVDDDDEEVMEEEEEEVEVLDRGTVVEVKVSTQPQAPTAGKVHRSRLVINKFVGSTPLSVDQPRCDDGARQPEANTRDDETTAAAQPSRPTMRRVPSSTTTLAAAVAAASTGTDVPPAPEDDDECGGLHLPAPAAAETKQLLLLSFTSRRGDKQDLLQSVRRCRQLRQKKLFILEPYCIATS

SEQ ID NO: 86718 - protein, 57 aa, Zea mays
  Coding DNA Sequence Number=SeqID_43343
MVKNFGSKTVQIAVNAVCRRKGEAQKIQRLTQRRSCEAEKLRHVRRKGNRLKDDKAI

SEQ ID NO: 86719 - protein, 303 aa, Zea mays
  Coding DNA Sequence Number=SeqID_43344
  Gene Ontology: Mol. function=serine-type peptidase activity; Cellular component=ornithine carbamoyltransferase complex; Biological process =proteolysis
  Homolog annotation: Hit_ID=Q5ZAM8; Match level="QueryCoverage=67%, HitCoverage=46%, E-value=3e-71, Identity=58%"; Hit description =Putative prolylcarboxypeptidase, isoform 1
MFGCLYAKSERLSHLKTSQTKCVHNLLVHGSVDTPSTCTWPSRKVVAPRIPHPPPPLLPAINVHASHRAADPPPSSPSARRPWLDHFSFPGVEDEDEAVVFFQQRYLHRYYRESMPFGSKAKAYSDSKFPTYLTAEQALADFVVLLTDLKRNLSAEGSPVVLFGGSYGGMLAAWMRLKYPHIAIGVLHHQLRSCSLRTLFLLLYSMISYLMILGTLKTSGDLSDWLSSAYSYLAMVDYPLPSEFLRPLPANPIKEVCGNIDSQPKGIGTLERIYAGVNVYYNYTDIVDCFDLNDDPHGMGGWD

SEQ ID NO: 86720 - protein, 613 aa, Zea mays
  Coding DNA Sequence Number=SeqID_43345
  Gene Ontology: Mol. function=hydrolase activity, acting on acid anhydrides, catalyzing transmembrane movement of substances; Cellular component=integral to membrane; Biological process=calcium ion transport
  Homolog annotation: Hit_ID=Q9LM01; Match level="QueryCoverage=23%, HitCoverage=13%, E-value=5e-44, Identity=62%"; Hit description =Calcium ATPase
  Pfam annotation: Domain name=PPR; Domain location=372-406; Score =27.3; E_value=5.5e-05; Accession=PF01535.11; Description=PPR repeat
MEHQDAAICKLLDEMRLMEARLSERISGRCDDVEHHLDEHREEPCDETSRFDKGIRRPQEDRELVQPPRRVESATCVESSVPRASSTELDREFIAASAFVTASVASSTSALEAGAHVDVAGEPEFPPRVTLDGHPDDELLHVEGAVVRPLLEEREQQHGTAQRVIVARGQSVLHRQYQLDSSPLDSCNIFAPERPADREMVEASAVMVVWAYDAACDRVGVQEVKHACEVGCSGGEMCLFTDLLGDLLCRIHRSPDSLMLVVETTIGTNSTEIAGIVRGCAKTAVSVGTTQQAKDDPIYTKVGSILGLRVSPSHWRKGMGKKLADREEDEVVQASYTYNIYNNWAPLEDALRLFDRMCMEHDSPRTSAVNLGSFNVMVDAYCHAGRGQYAIKVFGKMPRRGLCQMYSSNNLIDWLGKNKLVGKSEGWYMEEAARAVLGEWNKAIMATTCANGKIATICHDASIAHSEHQYVATGMPTEVVLEVLVENMGLPGGYTPSFDSSDLRRSCQWWNNLAKRVATLEFDRTRKSMGVIVKANSGKNSLLVKGAVENLLERCTYIQLLDGSVVLLDDGAKALILFTLHDMSASALSCLGFAYNPMKVKLAWSGMDPALPT

SEQ ID NO: 86721 - protein, 78 aa, Zea mays
  Coding DNA Sequence Number=SeqID_43346
  Subcellular localization annotation: CTP_CleavageSite=42; ConfidenceScore=5.14e-01
MAADGPPAGGGIDDVFPAWWKNNVRGHPVPSPVDGGGGGATKAKQEATPRRLSSRSTAPAVLNSVMKLTNKFEFKMEI

SEQ ID NO: 86722 - protein, 249 aa, Zea mays
  Coding DNA Sequence Number=SeqID_43347
  Subcellular localization annotation: CTP_CleavageSite=9; ConfidenceScore=5.14e-01
MSGAHRTVRCPLLAVGSATCPTQIARPTVGPADRWLTGQSGAHRTVRRSFSEAPTRRGGDPDLLRRVEYASEGANPEEEQALQPRGSGPQRGAGAAAELRGARWLIGGAQGERAEVAELAAVEVVGEEVTGVELVRAAPSQKQRLPKRMTGIVRIGKLEDEGVALGQGDHELAVPVYDMSSQYHLLPCHPGEHIQVQVLQVGMLQPRLLVVPLPRHQAHWQWLHNVQINHVQYRCKNPHSTHPYPLKPD

SEQ ID NO: 86723 - protein, 467 aa, Zea mays
  Coding DNA Sequence Number=SeqID_43348
  Homolog annotation: Hit_ID=Q8H6I6; Match level="QueryCoverage=95%, HitCoverage=73%, E-value=1e-147, Identity=64%"; Hit description =Putative uncharacterized protein ZMRS072.10
  Pfam annotation: Domain name=Remorin_C; Domain location=299-423; Score=79.2; E_value=1.3e-20; Accession=PF03763.4; Description =Remorin, C-terminal region
  Subcellular localization annotation: CTP_CleavageSite=95; ConfidenceScore=5.57e-01
MATTLARSISNSNGHERRHEASTTSSSSSSSTASAQKRRGESQQQAAVVPATPGPGPALQFLASPAAHHHHPQTQLVAPRRSVPSKWEDAEKWLRQSSSSSGSDHHLHGNARAAFSRQRSGGLGHRGGAGGGGGDEKSAAVAVRRSVDALRDAHSLALYAAPAAEVLLKDKFTDNEEPSKESFVFRSSCCEAAEPAKGADDDDDGRCQRRRDVGTEMTPLGSSCHTPLKSASPARHNTPASRSSGPLVPYTGGGGTDISELAGFRLAKLDLGARFGAHATLVGWSSKEEEEDDDEDVSKSLRHFEATVGGTACDRRGGGGDCRWDDDDRAKSCIRYQREEAKIQAWVNLESAKAEAQSRKLEVKIQKMRCNLEEKLMRRMTTVQRRAGEWRATARAQHLQQLRRAAAHGDGDGRRLRATATSTAHHHHRHLPGSSDAPSCACFPCSTSTSGGGGGNNVVSGGLLSYY

SEQ ID NO: 86724 - protein, 461 aa, Zea mays
  Coding DNA Sequence Number=SeqID_43349
MPPLVRRHKDDRDVLLRPCLPQLEDAATGPHRHANSSFPRRRSKKLRREEMGPQIPVGGNPQKPFVNRREDGCLRDGVGAKIVQLHPVEVQNRPHETTCRHSEPLLVKRDEAQHIPRRRGRGGSARRGHPLRLRVTGERTKQTIGNKSLQIVRRDGGERPRVARRNNGYPDRRHLWQAKQATLHLRHDDRVKKGTGKGDTPKGILLREGSGPRAPLLIRGSKAGPLEGFNSRLRALGIRAHYWSEVRRLAPRKGSTAASGHSGSAPTTDQGFVGWPPKGSTAASEHAERGMTLGTLGHFRDRRERFCNRIPPEGGIEPSDPVKRGPGPANHPQEYSTACPAPTVVPLARVRSTAAKSSLGRHKKLRLARPQGSVPVSASEDGLRLARLQGSDSTTTPEDDGLRLARLQGSDSTSAPEDDELCLARPQGSDSTSTSEESPPRPNSGPNRPRRQGDHHYPAPS

SEQ ID NO: 86725 - protein, 157 aa, Zea mays
  Coding DNA Sequence Number=SeqID_43350
MVTRVCLLSPLDWAWERGFITGPGPSYLVSVLETLWIHSAAAGSGAPCADAAAFSGWGLCRTEYDRRGRRARRRRRRARAEPWPVSSEQERERVALRGRRSPWVFSSRDVAVAAAPKPPADPSSGRRAEDEVQLAAGARRGNATAARLKLRLRRLCA

SEQ ID NO: 86726 - protein, 244 aa, Zea mays
  Coding DNA Sequence Number=SeqID_43351
  Homolog annotation: Hit_ID=Q8H6I2; Match level="QueryCoverage=100%, HitCoverage=100%, E-value=1e-134, Identity=100%"; Hit description =Putative MURBZC
  Pfam annotation: Domain name=Zea_mays_MuDR; Domain location=62-244; Score=-33.8; E_value=0.0032; Accession=PF05928.2; Description=Zea mays MURB-like protein (MuDR)
MDSAAELCAQKLSLAAVAARDTLNASVAASIVAGDYCATFSLGNNVVSTLDVLEFAVAAENSALRSYKQASAAVDCAKETVAKYSENCLVHMMILKKTEGCPYVVHISSCHVSASLVQFMVNRKLAQALRYAMSQMSDTAKKLQDTASLCYTDEEVVDGFKLTQVARSMDELAEMLEVTAIDCQVSMMDPTTMLEAGYASEDTAVWEDVFRDREIMNQPLEAETLAEHCAKWGLNYNEIWDRSV

SEQ ID NO: 86727 - protein, 198 aa, Zea mays
  Coding DNA Sequence Number=SeqID_43352
  Gene Ontology: Mol. function=hydrolase activity; Cellular component =cytoplasm; Biological process=purine base metabolic process
  Homolog annotation: Hit_ID=A2XNQ9; Match level="QueryCoverage=93%, HitCoverage=72%, E-value=1e-80, Identity=78%"; Hit description =Putative uncharacterized protein
  Pfam annotation: Domain name=dCMP_cyt_deam_1; Domain location=40-142; Score=137.1; E_value=5e-38; Accession=PF00383.13; Description =Cytidine and deoxycytidylate deaminas
MGAQHPENAVVGWGRGHVMESKDGTISFASAFAAHQEAVQDRDHKFLTKAVEEAYRGVDCGDEGPFGAVVVRNDEVVVSCHNMVLKHTDPIAHAEVTAIREACKKLGKIELSDCEIYASCEPCPMCFGALHLSRIKRLVYGAKAEAAIAIGFDDFIADALRGTGFYQKANMEIKKADGNGALIAEQVFEKTKEKFQMY

SEQ ID NO: 86728 - protein, 221 aa, Zea mays
  Coding DNA Sequence Number=SeqID_43353
  Gene Ontology: Mol. function=structural constituent of ribosome; Cellular component=intracellular; Biological process=translation
  Homolog annotation: Hit_ID=Q8H6J0; Match level="QueryCoverage=100%, HitCoverage=87%, E-value=1e-105, Identity=76%"; Hit description =Putative 40S ribosomal protein
  Pfam annotation: Domain name=Ribosomal_S12; Domain location=102-220; Score=31.3; E_value=1.8e-06; Accession=PF00164.16; Description =Ribosomal protein S12
  Subcellular localization annotation: CTP_CleavageSite=94; ConfidenceScore=5.22e-01
MSCPRILARRRRRPKYALSFRPDLLPSVSLITQLASCLVKAISALSSAFPTRAARSLLRVPPSTTDAMPPPVRVPSAICSPALGLRMSLCHWLSCSDIHALPAANLLQLSATPPPPTWHAACYCCVAAGLPSSPNPSSPRPAVKLRFEKLLYALRYFPEEAIDPDVSLSLAFSFKDEVLIAGFGRKGHAVGDIPGVRFKVVKVSGVSLLALFKEKKEKPRS

SEQ ID NO: 86729 - protein, 639 aa, Zea mays
  Coding DNA Sequence Number=SeqID_43354
  Gene Ontology: Mol. function=nucleic acid binding; Cellular component= lysosome; Biological process=regulation of transcription from RNA polymerase II promoter
  Homolog annotation: Hit_ID=Q8H6I9; Match level="QueryCoverage=91%, HitCoverage=91%, E-value=0.0, Identity=95%"; Hit description =Putative oligouridylate binding protein
  Pfam annotation: Domain name=RRM_1; Domain location=121-188; Score =58.3; E_value=2.6e-14; Accession=PF00076.13; Description=RNA recognition motif. (a.k.a. RRM, RBD,
  Pfam annotation: Domain name=RRM_1; Domain location=206-277; Score =95.7; E_value=1.4e-25; Accession=PF00076.13; Description=RNA recognition motif. (a.k.a. RRM, RBD,
  Pfam annotation: Domain name=RRM_1; Domain location=325-392; Score =62.8; E_value=1.2e-15; Accession=PF00076.13; Description=RNA recognition motif. (a.k.a. RRM, RBD,
  Pfam module annotation: Pfam domain module=RRM_1::RRM_1::RRM_1; Domain location=121-188::206-277::325-392
MHHQQRMKQAAAAAAAAQQQQLMQQALLLQQQQQSQAQPPLFPGHHPHPGLLAAPQVGQFSVIPLSRLSGDGALWDAERDSIAKHIGHFNVNSFGANCPKIEPIVSGNLPPGFDSSTCRSVYVGNIHLQVTDTVLQEVFQSIGPVEGCKLIRKEKSSFGFIDYYDRRYAALAILSLNGRQLYGQPIKVNWAYTSTPREDTSGHFNIFVGDLCPEVTDATLFAFFSGYSTCSDARVMWDQKTGRSRGFGFVSFRNQQDAQSAINDLNGKWLGNRQIRCNWATKGANAGEEKQILDTKVDLSNGSSESGKENPNDDGPENNPQFTTVYVGNLPHEATMNDVHLFFHSLGAGSIEEVRVTRDKGFGFVRYSTHEEAALAIQMGNGQLIGGRQIKSSKHELQILPTLSATFRSCTWTSTHLNHRLRDYDGAYELRTAEESDRCEGSSSVEFLLEGNDAVRQGGDLYDAGTTCMPCTHIYVIPIKCFLQTLSAVRVLGFIMKDESLLPDEGRCCDTCEVIIRQGEPCSSGVAESSEDKVVGKVARCSWGSKPTPQGTASLPLPPPALAPFSTGVSATDLLAYQRLTLSKMASNPALMGQHALKQVAALGIGGGASQSIYDGGFQGINTATGTTSVQQQQQLMYY

SEQ ID NO: 86730 - protein, 566 aa, Zea mays
  Coding DNA Sequence Number=SeqID_43355
MNKTPALKVPSQTELRFCPRGYEQPPTLEGPRGDKAPGRPPPHAPAAATTTSAPGGRTAAAMASRRTPLQQCPRPRLHSRGEDKYKESEARSADGGGDPVGDEDFSSRRHLGTDEGGKTRCISHRGLSLLQHAPPPPTTQGLGPTHHASWPKAEEAKLPRAVHATAQRLQAFLRFRPNQLVKGRTSMQSAGNRTRWAHPFDSNAPSMEAQAHTSCNRRASCYVQATAPPLAPLPRLLDYGTSTVTRGNSAYDPTVPARRIGHGPVSRGRRRDSRCGQKWADSNGGGRRAEAAGPEKGDTPKGILLREGNGPRAPLLIRGSKAGPSEGFNSRLRALGLRAHYWSEVRGPAPRKGSTAASGHSGSAPTTDQGFVGWPTKAKSGLRHHRKLRIALPQGSDSGSAPEDDELRFARPQGSDSGSAPEDDELRFARPQGSDSALASADGLRLARPRGSDSTSALEDRLDLDLEGASTSPNPGLGPTTSQEAPSLPYPKLTQATGNKTGVPSGSLRQTWPSYRGLAARGRTGRRSRKAARSHPRGRLDPPGFETPTTGLSVSFCEGTFFFGFG

SEQ ID NO: 86731 - protein, 105 aa, Zea mays
  Coding DNA Sequence Number=SeqID_43356
MMKVDACRRCSKLKKWKRIGMMLGYKYTFDLKEAILTCPKGSCPKELCHQKSFDITQEKYDEASFINKLHHDEAGRQCREKVLFKLLSTNDNDVPVTFVNPICNC

SEQ ID NO: 86732 - protein, 279 aa, Zea mays
  Coding DNA Sequence Number=SeqID_43357
  Homolog annotation: Hit_ID=Q6QP51; Match level="QueryCoverage=45%, HitCoverage=56%, E-value=3e-10, Identity=34%"; Hit description =Putative growth-regulating factor 1
MTASKEPPQSAWAPHPLLVRGSKAGPSEGFNGRLRLLGLRAHYLSGVRRLALERNDLVMESHQREASSPRTPSKGDRVRQITRSHFAAPLTGLTRGQRRLRRSDCCATRQSEADRQPGPASGTIGNSASPDPGLGLGLSPGRRRTPLRPTQGSDSGSAPEDGELRSARPRARTRAQPRKTGSDSGSAPEDDELRFAQPQGSDSALASADVLRLARPRGSDSTSASEDRLDLDLGGASTSPNLGHRPTTSTGGAIITLPQADSGYGEQDRRPIWLAPPDK

SEQ ID NO: 86733 - protein, 163 aa, Zea mays
  Coding DNA Sequence Number=SeqID_43358
MVCLGLGGRKKHTLQDNPIMQAQILTVEGSSSTLGVNYTFGEGLLQESGSSRRLGRSPRGLGQLSPEDISPARGLGNSIPASVPPVDDPARLWPTKSSFRANSASVRADTATPGFGSSKSGRGVPLTEQEKPRTARPTEPRDSYASGIRIPHSSPLHGATHAW

SEQ ID NO: 86734 - protein, 146 aa, Zea mays
  Coding DNA Sequence Number=SeqID_43359
MGKNNKRKREPTPPSEDFGDSEYSEEEFSSESEGSPAPIPLRESSDDSDDSQGFAAEVWTYIRAIERSGLEGSDESEYSSDEEDSSEEDGGGDGEDNDDDDDDEGGGGGDGDGSGGSSGGKGDDGGSSRGGSGGGGSSRGSNRASG

SEQ ID NO: 86735 - protein, 164 aa, Zea mays
  Coding DNA Sequence Number=SeqID_43360
  Subcellular localization annotation: CTP_CleavageSite=83; ConfidenceScore=5.03e-01
MGSKTLSTKCTFASLTRLRKKTLKDMLAIGNQGISRVINFSRKKMHQLFSTQLLSPNASNKAIKILKQQGGGKCTGTCLDNTRLVLLGGNQPFVLALIQSAIFRLIPQHHLGEKPTLNIILWSTQLWSSISRDQLAYLIRCTMHMYEYQDEYRKIILRFYRMKN

SEQ ID NO: 86736 - protein, 264 aa, Zea mays
  Coding DNA Sequence Number=SeqID_43361
  Subcellular localization annotation: CTP_CleavageSite=49; ConfidenceScore=5.10e-01
MALSFLPLPPRAPGPCSYFTWPRLLVIEVAESLSPARVPISLLPSADCSSSMAGTRPQRRARPCPLLQLAPLCLSSLLGRSTDRSHCVARVPGRARFLPAQDAVDPSPFFPFSVSADRTPSLTPASTSRFLTGGRVCVVVFFRGSAHFAVVLRSLLGRCPCDATEHKLRTSNGLHLRCPKNGGKLTQLSLALLALCAEESDTAITHEDFRLTCGSGLHLRQDNNTSVELATRQWHTREHGMIKNFKNFRVRTMLSILNVHVQRI

SEQ ID NO: 86737 - protein, 194 aa, Zea mays
  Coding DNA Sequence Number=SeqID_43362
MGVAVAETFAQEPPAQPADAPTPNTTPAHALARDQPAGASDGWHAEAANLARTRFQPSARGAGATNNTVSAPATHHRPHAPLLRGHLARTRNPRMCRTLPPKYRRGPGQPRRAGEGSPSHTRRCHLLPNRFCDVLPRALHRLRLLHELDLSNNRFVGPFPDVVLDLLVWDALSNEETMQIVAYIEVCMILMVAM

SEQ ID NO: 86738 - protein, 70 aa, Zea mays
  Coding DNA Sequence Number=SeqID_43363
  Homolog annotation: Hit_ID=Q6J9V9; Match level="QueryCoverage=70%, HitCoverage=17%, E-value=2e-17, Identity=85%"; Hit description =Putative uncharacterized protein
MAEARATLPRYPRTFSRPAGTIYNGIPPEGGTEPSDPIEWVQVQQSTCRGSGAALAPGYGQTVDSVNKPA

SEQ ID NO: 86739 - protein, 188 aa, Zea mays
  Coding DNA Sequence Number=SeqID_43364
  Gene Ontology: Mol. function=hydrolase activity; Cellular component =cytoplasm; Biological process=purine base metabolic process
  Homolog annotation: Hit_ID=A9PB35; Match level="QueryCoverage=66%, HitCoverage=67%, E-value=1e-54, Identity=82%"; Hit description =Putative uncharacterized protein
  Pfam annotation: Domain name=dCMP_cyt_deam_1; Domain location=70-172; Score=122.8; E_value=9.8e-34; Accession=PF00383.13; Description =Cytidine and deoxycytidylate deaminas
MVQRLTSASTVLRRVLDNPALQDCQENNGFGHMMDEDVINNISVRLKLSLTVWDFTLPVTPSLPVVFGVQDRDHKFLTKTVEEAYRGVDCGDGGLFGAVVIRNDEVIVSCHNMVLKHTDPTAHAEVTAIREACKKLGKIELSDCEIYASCEPCPMCFGAVHLSRIKKLVYGAKAEAAIAIDLQCTTLL

SEQ ID NO: 86740 - protein, 656 aa, Zea mays
  Coding DNA Sequence Number=SeqID_43365
  Gene Ontology: Mol. function=manganese ion binding; Cellular component=nucleus; Biological process=response to DNA damage stimulus
  Homolog annotation: Hit_ID=A5YZR9; Match level="QueryCoverage=100%, HitCoverage=95%, E-value=0.0, Identity=92%"; Hit description=MRE11B
  Pfam annotation: Domain name=Metallophos; Domain location=58-302; Score=57.5; E_value=4.7e-14; Accession=PF00149.19; Description =Calcineurin-like phosphoesterase
  Pfam annotation: Domain name=Mre11_DNA_bind; Domain location=303-513; Score=201.4; E_value=2.2e-57; Accession=PF04152.5; Description=Mre11 DNA-binding presumed domain
  Pfam module annotation: Pfam domain module=Metallophos::Mre11_DNA _bind; Domain location=58-302::303-513
MEQDQSADSGFDFATGIVTSGSAVAPHSGEQAEASAYQADDRMAFNETYWEEKGGNSLRVLVATDCHLGYLEKDEVRGFDSFDTFEEICSLAVKNKVDFLLLCGNLFHENKPSNSTLVKAIEILRRYCMNDCPVQFQVISDQAASLQNRFCQVNYEDPNYKIGLPVFTIHGDQDYPTGTDNLSVNDILTAGNFLNYFGKTDLGCTGVGKVTVYPVVIRKGETYIAMYGLGNIKDGRLKRMLHEPGAVNWMQPEFQDETPSSDWFNILVLHQKRTRGSPGDAISELLLPRFVDMVIWGHEHECLIDPQEVPGMGFHITQPGSSIATSLINTEANPKHALFLEIKGREYRTTKIPLQSVRPFEYAEVVLEDQVDVDPGDEASIHEHLHKVVSNLIDKSREEASSSGSKPKLPLVRIKVHHTGLSTINSKQFGQHYVGKVVNPQDILLLTRSRQRHQTMQESCNISEDLCPNELNQQTVEALIADSNIVPNFLLILSFLKPQVLPIDDFNSALHEFVEGDDKRAFHACVQQNIEEAILQEKKSLTRERTSSENLQTDALGVFEKQKRSTTTEEQRALDSDDEPIESSDPEESGGSQQAGKKRRAAPGGGSAAAGARRKTDLAAFQRVPVKEDDAATARKRRPPVAAGRYGAVIRRRMPK

SEQ ID NO: 86741 - protein, 73 aa, Zea mays
  Coding DNA Sequence Number=SeqID_43366
MGYEAAAAVAARGQLRGEEKRGARSHGQREKEKEKKKAATRCSVVWMLRRVLPLRRGANALYNTSSPYNTTTG

SEQ ID NO: 86742 - protein, 322 aa, Zea mays
  Coding DNA Sequence Number=SeqID_43367
  Homolog annotation: Hit_ID=Q5GAU8; Match level="QueryCoverage=13%, HitCoverage=30%, E-value=2e-12, Identity=76%"; Hit description =Putative uncharacterized protein
MAPSYVGYSAEMKDMYREALWQKRGRSRDLYPDVSSKDALVPPELPVPNCDCGRPTWSQRQRKRKNEWAQELKFDPVLCKHGIEAKYGLVPSELGVGYFCGHMVDYDERSRKCGWESYDDKGELMRTIKSKRLKGQKMHCGSQLVDSYINDRIQDMRRFAKSMSFDIPMRAEQRRLKAANEKRAQDAREWEAARAEKHMLGNLVDHLKGKIGCVVNYLTDEARARYVLEKMATVELMEEEHQGLHEEEEDDTSRLSELIALAEARYVLKRRMTSYVSSRRIDEAEANYYKRNAEKCDAGQCSKWNEMSLRIARRMTLKMNYL

SEQ ID NO: 86743 - protein, 187 aa, Zea mays
  Coding DNA Sequence Number=SeqID_43368
  Homolog annotation: Hit_ID=A5BKB8; Match level="QueryCoverage=47%, HitCoverage=20%, E-value=1e-12, Identity=48%"; Hit description =Putative uncharacterized protein
NPANHRVFERKLRPKPSGGGHVCLGVTPKDTPNTPPRGEGRGVWPPAPQGERPGARPPFGPKDPSSDRACPRTATPATDRAQVLWKGTPGRVRAPSGPDPIAPRGAINESGCLGMQPKSGGFELEHSCRDPKDGELCLSGAKPEETLVEARSDTDDSWSPHEFYRVKPMIRGIRGATPSTYSQTLNR

SEQ ID NO: 86744 - protein, 868 aa, Zea mays
  Coding DNA Sequence Number=SeqID_43369
  Gene Ontology: Mol. function=protein transporter activity; Cellular component=nuclear pore; Biological process=protein import into nucleus, docking
  Homolog annotation: Hit_ID=Q9FJD4; Match level="QueryCoverage=100%, HitCoverage=99%, E-value=0.0, Identity=94%"; Hit description =Importin beta
  Pfam annotation: Domain name=HEAT; Domain location=167-205; Score =5.8; E_value=3.7; Accession=PF02985.13; Description=HEAT repeat
  Pfam annotation: Domain name=HEAT; Domain location=212-248; Score =20.6; E_value=0.0057; Accession=PF02985.13; Description=HEAT repeat
  Pfam annotation: Domain name=HEAT; Domain location=253-289; Score =1.4; E_value=17; Accession=PF02985.13; Description=HEAT repeat
  Pfam annotation: Domain name=HEAT; Domain location=360-396; Score =15.5; E_value=0.13; Accession=PF02985.13; Description=HEAT repeat
  Pfam annotation: Domain name=HEAT; Domain location=402-439; Score =15.2; E_value=0.14; Accession=PF02985.13; Description=HEAT repeat
  Pfam annotation: Domain name=HEAT; Domain location=452-486; Score =1.8; E_value=15; Accession=PF02985.13; Description=HEAT repeat
  Pfam annotation: Domain name=HEAT; Domain location=496-535; Score =7.7; E_value=1.9; Accession=PF02985.13; Description=HEAT repeat
  Pfam annotation: Domain name=HEAT; Domain location=85-121; Score =11.3; E_value=0.56; Accession=PF02985.13; Description=HEAT repeat
  Pfam annotation: Domain name=IBN_N; Domain location=21-101; Score =88.3; E_value=2.5e-23; Accession=PF03810.10; Description=Importin -beta N-terminal domain
  Pfam module annotation: Pfam domain module=HEAT::HEAT::HEAT::HEAT::HEA T::HEAT::HEAT::HEAT::IBN_N; Domain location=167-205::212-248::253 -289::360-396::402-439::452-486::496-535::85-121::21-101
MEVTQLLINAQSIDGTVRKHAEESLKQFQEQNLAGFLLSLAGELANDEKPVDSRKLAGLVLKNALDAKEQHRKYELVQRWLALDMSTKSQIRAFLLKTLSAPVPDVRSTASQVIAKVAGIELPQKQWPELIVSLLSNIHQLPAHVKQATLETLGYLCEEVSPDVVEQEHVNKILTAVVQGMNAAEGNTDVRLAATRALYMALGFAQANFNNDMERDYIMRVVCEATLSPEVKIRQAAFECLVSIASTYYEKLAHYMQDIFNITAKAVREDDESVALQAIEFWSSICDEEIDILEEYGGEFAGDSDVPCFYFTKQALPGLVPLLLETLLKQEEDQDLDEGAWNIAMAGGTCLGLVARAVGDDIVPHVMPFIEEKISKPDWREREAATYAFGSILEGPSADKLMAIVNAALTFMLNALTNDPSNHVKDTTAWTLGRIFEFLHGSTIETPIINQANCQQIITVLIQSMNDAPNVAEKACGALYFLAQGYEDIGPSSPLTPFFQEIIKSLLAVAHREDATESRLRTAAYEALNEVVRCSTDETSTMVLQLVPVIMMELHNTLEGEKLSLDEREKQNELQGLLCGCLQVIIQKLGSEPTKSKFMEYADQMMGLFLRVFGCRSATAHEEAMLAIGALAYAAGPNFAKYMPEFYKYLEMGLQNFEEYQVCAVTVGVVGDVCRALEDKILPYCDGIMTQLLKDLSSNQLHRSVKPPIFSCFGDIALAIGEDFDKYWRYSMPMLQSAAELSAHSAGADDEMTEYTNSLRNGILEAYSGIFQGFKNSAKTQLLIPFAPHILQFLDSIYMEKDMDEVVMKTAIGVLGDLADTLGSHVGGLIQQSVSSKEFLNECLSSEDHTIKEAAEWAKHAITRAISV

SEQ ID NO: 86745 - protein, 198 aa, Zea mays
  Coding DNA Sequence Number=SeqID_43370
  Gene Ontology: Mol. function=structural constituent of ribosome; Cellular component=ribonucleoprotein complex; Biological process =translation
  Homolog annotation: Hit_ID=Q9FLN4; Match level="QueryCoverage=100%, HitCoverage=100%, E-value=1e-108, Identity=100%"; Hit description =50S ribosomal protein L27, chloroplast precursor
  Pfam annotation: Domain name=Ribosomal_L27; Domain location=59-139; Score=202.0; E_value=1.4e-57; Accession=PF01016.10; Description =Ribosomal L27 protein
  Subcellular localization annotation: CTP_CleavageSite=19; ConfidenceScore=5.60e-01
MAMATSMSLNLIGAFKGLSLSSTSSFLRGDLSFSPKTSFTVTLPLENLQAPIPLTIESAHKKGAGSTKNGRDSPGQRLGVKIYGDQVAKPGAIIVRQRGTKFHAGKNVGIGKDHTIFSLIDGLVKFEKFGPDRKKISVYPREIVPENPNSYRARKRENFRLQREKKKARRENYSYTLPTPELVLASASVDDAEANPEC

SEQ ID NO: 86746 - protein, 466 aa, Zea mays
  Coding DNA Sequence Number=SeqID_43371
  Gene Ontology: Mol. function=protein binding; Cellular component =nucleus; Biological process=regulation of transcription, DNA -dependent
  Homolog annotation: Hit_ID=Q8VZY7; Match level="QueryCoverage=94%, HitCoverage=93%, E-value=0.0, Identity=84%"; Hit description =Polycomb group protein FIE1
  Pfam annotation: Domain name=WD40; Domain location=181-220; Score =27.1; E_value=6.3e-05; Accession=PF00400.23; Description=WD domain, G-beta repeat
  Pfam annotation: Domain name=WD40; Domain location=226-266; Score =35.2; E_value=2.4e-07; Accession=PF00400.23; Description=WD domain, G-beta repeat
  Pfam annotation: Domain name=WD40; Domain location=371-411; Score =0.2; E_value=30; Accession=PF00400.23; Description=WD domain, G-beta repeat
  Pfam annotation: Domain name=WD40; Domain location=85-126; Score=0.5; E_value=28; Accession=PF00400.23; Description=WD domain, G-beta repeat
  Pfam module annotation: Pfam domain module=WD40::WD40::WD40::WD40; Domain location=181-220::226-266::371-411::85-126
MPPSKARRKRSLRDITATVATGPVANSKPGSSSTNEGKQHDKKKEGPQEPDIPPLPPVVVNIVPRQGLGCEVVEGLLVPSRKREYKPNSKYTVGNHPIYAIGFNFIDMRYYDVFAIASCNSVIIYRCLENGGFGLLQNYVDEDKDESFYTLSWTIDQVDSSPLLVAAGSNRIIRVINCATEKLDKSLVGHGGSIHEIRTHASKPSLIISASKDESIRLWNVHTGICILVFAGAGGHRHDVLSVDFHPTEVGIFASCGMDNTVKIWSMKEFWIYVEKSYSWTGHPSKFPTRNIQFPVLTAAVHSDYVDCTRWLGDFILSKEKVALTAYLNCHHAATTKPCKYGFWRMDQSVKNAVLLWEPKPDKRRPGEGSVDVLQKYPVPKCSLWFMKFSCDFYSNQMAIGNNKGEIYVWEVQSSPPVLIDRTILGAADDGAIWRWDEVDPAASSSKPDQAAAPAAGAGADADADA

SEQ ID NO: 86747 - protein, 423 aa, Zea mays
  Coding DNA Sequence Number=SeqID_43372
  Homolog annotation: Hit_ID=Q7XBD6; Match level="QueryCoverage=100%, HitCoverage=100%, E-value=0.0, Identity=79%"; Hit description =Putative uncharacterized protein Z013I05_12
MSVAVCRGPAVPAFEAPCWLRPAEPYRQPEAVVDVDRPAQADIWNAIQADVGKVGAGAKKASKPYVRDPFVRRSSILMSQKSLEVCTESLGNETGSGDFASSLDMSCLFDAPLPAAADESFWQHDADRCCEEKEQWGSKDLAAVNYHCSAGTRPRRRSFPPPLPSMSRRDGPCVQMRPRRQDGRLVIEAVAVRPRGYLHARRQGGRLCLSFVECSARDQSAATRVTAAAAAEAPYFCAVEPRNAQEEEAAVEMDDDEVMEDDEEEEEVEVLDRGTVVEVKVSTQPQAPTAAKVHRSTLVINKFVGSTPLSVYQPRRHAANAAQPEAETCDETAAQSPRPTALRRVPSSTTTLAAAVAAASTDDDDECGGLHLSASAAAETKQLLLSFTSRRGDGQDLLQSVRRCRQLRQKKLFILEPYCIATS

SEQ ID NO: 86748 - protein, 680 aa, Zea mays
  Coding DNA Sequence Number=SeqID_43373
  Gene Ontology: Mol. function=metal ion binding; Cellular component =cytoplasm; Biological process=response to stimulus
  Homolog annotation: Hit_ID=Q5GA19; Match level="QueryCoverage=36%, HitCoverage=81%, E-value=1e-112, Identity=82%"; Hit description =Putative uncharacterized protein adh1E
MVEGGGAGAGRAEEELDGQFVMSMTCVLLGTVPALMLMCYLGFPSCTEACSLLPKIFSKETHPKIAQVLLERQRPDMALLVLKCTGRDSFSATENFEKDGISSLSEAVTAVRVRIECGLLTEAFMYHRSYCSKVKEQHSANMTHTEDAFEGSWIYHVEMMMVEFCTICIERNLVDKMIDLPWDSEEEKHLHKSLFESAHEAPMDPIGSLLVVYYLRRYRYLEAYGVDRSLQKFEQKELENATEEIASKIRAIAQWRESLVLRPHERDYELWPAAMWVSAWGDLQPLRKIRPPPCERAHRGALGPPPAAPMWLTSDPASRGRVGAPATAWARPSPASRCCEDHLHPGATLLQCWRLDACIGKEKVEERKKEADRWAPHAKCLDMLPEVQRENVKAINSGEQIQFARTAQISSPAHVGKSQNPVMDLSTTFTSVLQNKSSLFSKNNALTDSSGLIRSSHSERKVPSALQTRAPPHGSPISNMRSTVGGKFPTVGQNVDSPFLRGAKGISSRKGETGFKEGIKYADHDPLPMYLNLSSGDTPTKDYRTSLLKAEANKTTYFQGQDSVGKGEFHFGSRAVKPFNLNGTGAGQNGLAKISGYAGFREDYKVPTKENILSKKSSVGGAEASKGVSRWRSDESSEEERTNRESGAPLLCPNVTTIVLRECVCGMRLSCIIYIAMAEM

SEQ ID NO: 86749 - protein, 946 aa, Zea mays
  Coding DNA Sequence Number=SeqID_43374
  Gene Ontology: Mol. function=DNA-directed DNA polymerase activity; Cellular component=mitochondrion; Biological process=nucleobase, nucleoside, nucleotide and nucleic acid metabolic process
  Homolog annotation: Hit_ID=P10582; Match level="QueryCoverage=89%, HitCoverage=91%, E-value=0.0, Identity=93%"; Hit description=DNA polymerase
  Pfam annotation: Domain name=DNA_pol_B_2; Domain location=316-750; Score=469.2; E_value=5.4e-138; Accession=PF03175.4; Description=DNA polymerase type B, organellar and viral
MDILRSAFGCFSETASFHWLYEIPNETSLRRQRNGKLLGSKPLILCRLSENKYKQGTYDYESEGQACGFDMVSHFSQSHWAIEKYTSTFPIYIKIPTRVYPSIQGSAKFTLQYRLNIDGNPINITLSKAIKLTYADGTRIANEFILKEIINVLNKYAENNQSCDVEAISVRAYSEGSIDLNQASIPTKDESLNYLKGALIKYSDINNLEIPKMGRRSKRRYQSYIPVDKTEMKNKTLFFVADLETLLLKRRDTDVDKTHVPYAGGYMMVDMEKRVNADHITTFYAHDYSKVCQDFHDMSEKMLTEMINRIVKDVQRTGSSMVVYFHNLSQFDGIMILSFLTKSYKNCHIEPIMRNDCIYSIKLYKVSKNGDKRLVLTFMDSYLLLKVKLADLANSFCPELGGKGSFDHQNVTVDKLPSIREDSLTYLKQDILITAAVMQRAKAIIWEEYGIDILKVLTISALALKIFRRVYYKDDDDNRIYIPDDNEAQFIREGYYGGHTDVYKPYGENLYYYDVNSLYPSSMLDDMPIGKTRWVSDLGSKKSKIVLNDMFGFIRAFIICPKHIKKPLLPYKKDDGTIIFPTGRFLGVYFSEELKYAVSLGYKVYPICGYIFDRKESPFKRFVYDIYSKRLDAKAKGEKALDFIYKITMNSLYGRFGISPESTTTQIVSTEESRKLALYNDGFVQSYELSSDKCLVTCKNVRSLDLLKLSSDRPTYAAVQISAAVTGYARIRMHPFISRDDCYYTDTDSVVVERELPEEEVSPTALGKFKHEHFVEYGIFLAPKSYMLKASSVDQPIIKFKGAGKDEADEEWFINQLADPRAKKVISYVRKFSRNFRELLVQEKMCKYTMGLESKKREYVFDKNGVWVDTKPCHIGDFDVKSINPTSYRIIMNLLEENEDLRNEFSNSEIMIANREIQADAAKKRKASKLRGKPLRGGDTPSHIEE

SEQ ID NO: 86750 - protein, 85 aa, Zea mays
  Coding DNA Sequence Number=SeqID_43375
  Subcellular localization annotation: CTP_CleavageSite=32; ConfidenceScore=5.64e-01
MNRTSTSSVTPTALTALYPNPTCSGPGSSRISSSAGRARKLPFNECKQGSLLTLHLACVGGKERGIGKTRPYTLISTRKRHSGSD
